(19) United States
(12) Patent Application Publication
(10) Pub. No.: US 2025/0144149 A1
(43) Pub. Date: May 8, 2025

(54) ADENOSINE DEAMINASE BASE EDITORS AND METHODS FOR USE THEREOF

(71) Applicant: Beam Therapeutics Inc., Cambridge, MA (US)

(72) Inventors: Nicole Gaudelli, Cambridge, MA (US); Tanggis Bohnuud, Cambridge, MA (US); Scott Haihua Chu, Cambridge, MA (US)

(73) Assignee: Beam Therapeutics Inc., Cambridge, MA (US)

(21) Appl. No.: 18/984,585

(22) Filed: Dec. 17, 2024

Related U.S. Application Data
(63) Continuation of application No. PCT/US2023/069187, filed on Jun. 27, 2023.
(60) Provisional application No. 63/355,980, filed on Jun. 27, 2022.

(51) Int. Cl. A61K 35/28; A61K 38/42; C12N 9/22; C12N 9/80; C12N 15/11; C12N 15/85

(52) U.S. Cl. CPC A61K 35/28; A61K 38/42; C12N 9/22; C12N 9/80; C12N 15/111; C12N 15/85; C07K 2319/80; C12N 2310/20; C12Y 305/04004

(57) ABSTRACT

Adenosine deaminase base editors, compositions comprising the same, and methods for use thereof for altering a target nucleobase in a polynucleotide sequence. In embodiments of the disclosure, the base editors of the disclosure may be used to treat a disease or disorder, such as a hemoglobinopathy (e.g., sickle cell disease (SCD)).

### CROSS REFERENCE TO RELATED APPLICATIONS

[0001] This application is a continuation under 35 U.S.C. § 111(a) of PCT International Patent Application No. PCT/US2023/069187, filed Jun. 27, 2023, designating the United States and published in English, which claims priority to U.S. Provisional Application No. 63/355,980, filed Jun. 27, 2022, the entire contents of each of which are incorporated by reference herein.

### SEQUENCE LISTING

[0002] This application contains a Sequence Listing which has been submitted electronically in XML format and is hereby incorporated by reference in its entirety. The Sequence Listing XML file, created on Jan. 16, 2025, is named 180802-043903US_SL.xml and is 1,111,690 bytes in size.

### BACKGROUND

[0003] Targeted editing of nucleic acid sequences (e.g., the targeted cleavage or the targeted introduction of a specific modification into genomic DNA) is a highly promising approach for the study of gene function and also has the potential to provide new therapies for human genetic diseases. Currently available base editors include cytidine base editors (e.g., BE4) that convert target C•G base pairs to T•A and adenine base editors (e.g., ABE7.10) that convert A•T to G•C. There is a need in the art for improved base editors capable of inducing modifications within a target sequence.

### SUMMARY

[0004] As described below, the disclosure features adenosine deaminase base editors, compositions comprising the same, and methods for use thereof for altering a target nucleobase in a polynucleotide sequence. In some embodiments, the base editors of the disclosure may be used to treat a disease or disorder, such as a hemoglobinopathy (e.g., sickle cell disease (SCD)).

[0005] In one aspect, the disclosure features a method for treating a hemoglobinopathy in a subject in need thereof. The method involves a) contacting an isolated hematopoietic stem cell or progenitor thereof with two or more guide polynucleotides, or one or more polynucleotides encoding the guide polynucleotides, and a base editor containing a nucleic acid programmable DNA binding protein (napDNAbp) and an adenosine deaminase, or one or more polynucleotides encoding the base editor. The adenosine deaminase contains a combination of alterations relative to the following sequence of TadA*7.10 and has at least 85% sequence identity to the following sequence of TadA*7.10: MSEVEFSHEYWMRHALTLAKRARDEREVPVGAVLVLNNRVIGEGWNRAIGLHDPTAHAEIMA LRQGGLVMQNYRLIDATLYVTFEPCVMCAGAMIHSRIGRVVFGVRNAKTGAAGSLMDVLHYP GMNHRVEITEGILADECAALLCYFFRMPRQVFNAQKKAQSSTD (SEQ ID NO: 1). The combination of alterations contains i) F149Y and V82T; or ii) F149Y, T166I, and/or D167N, and the alteration V82T. The two or more guide polynucleotides target the base editor to effect an alteration to a beta globin polynucleotide (HBB) that results in expression of a beta globin polypeptide having an alanine at position 6 (Hb G-Makassar). The two or more guide polynucleotides target the base editor to effect an alteration in a cluster of differentiation (CD117) polynucleotide that results in expression of a CD117 polypeptide with reduced binding to an antibody that selectively binds a wild type CD117 polypeptide, thereby generating an edited cell. The method also involves (b) where the cell is in the subject or the method further involves administering the edited cell to the subject.

[0006] In another aspect, the disclosure features a cell produced by the method of any aspect of the disclosure, or embodiments thereof.

[0007] In another aspect, the disclosure features a pharmaceutical composition containing an effective amount of the cell of any aspect of the disclosure, or embodiments thereof.

[0008] In another aspect, the disclosure features an adenosine deaminase polypeptide containing a combination of alterations relative to the following sequence of TadA*7.10: MSEVEFSHEYWMRHALTLAKRARDEREVPVGAVLVLNNRVIGEGWNRAIGLHDPTAHAEIMA LRQGGLVMQNYRLIDATLYVTFEPCVMCAGAMIHSRIGRVVFGVRNAKTGAAGSLMDVLHYP GMNHRVEITEGILADECAALLCYFFRMPRQVFNAQKKAQSSTD (SEQ ID NO: 1). The combination of alterations contain F149Y and V82T. The adenosine deaminase has at least 85% sequence identity to TadA*7.10.

[0009] In another aspect, the disclosure features an adenosine deaminase polypeptide containing the following amino acid sequence:

(SEQ ID NO: 518)
SEVEFSHEYWMRHALTLAKRARDEREVPVGAVLVLNNRVIGEGWNRAIGL
HDPTAHAEIMALRQGGLVMQNYRLYDATLYTTFEPCVMCAGAMIHSRIGR
VVFGVRNAKTGAAGSLMDVLHHPGMNHRVEITEGILADECAALLCRFYRM
PRRVFNAQKKAQSSTD.

[0010] In another aspect, the disclosure features an adenosine deaminase polypeptide containing a combination of alterations to the following sequence of TadA*7.10: MSEVEFSHEYWMRHALTLAKRARDEREVPVGAVLVLNNRVIGEGWNRAIGLHDPTAHAEIMA LRQGGLVMQNYRLIDATLYVTFEPCVMCAGAMIHSRIGRVVFGVRNAKTGAAGSLMDVLHYP GMNHRVEITEGILADECAALLCYFFRMPRQVFNAQKKAQSSTD (SEQ ID NO: 1). The combination of alterations contains F149Y, T166I, and/or D167N, and the alteration V82T. The adenosine deaminase has at least 85% sequence identity to TadA*7.10.

[0011] In another aspect, the disclosure features an adenosine deaminase polypeptide containing the following amino acid sequence:

(SEQ ID NO: 519)
SEVEFSHEYWMRHALTLAKRARDEREVPVGAVLVLNNRVIGEGWNRAIGL
HDPTAHAEIMALRQGGLVMQNYRLYDATLYTTFEPCVMCAGAMIHSRIGR
VVFGVRNAKTGAAGSLMDVLHHPGMNHRVEITEGILADECAALLCDFYRM
PRRVFNAQKKAQSSIN.

[0012] In another aspect, the disclosure features base editor containing a nucleic acid programmable DNA binding protein (napDNAbp) and the adenosine deaminase of any aspect of the disclosure, or embodiments thereof.

[0013] In another aspect, the disclosure features a base editor containing: a nucleic acid programmable DNA binding protein (napDNAbp) and an adenosine deaminase. The adenosine deaminase contains a combination of alterations relative to TadA*7.10: MSEVEFSHEYWMRHALTLAKRARDEREVPVGAVLVLNNRVIGEGWNRAIGLHDPTAHAEIMA LRQGGLVMQNYRLIDATLYVTFEPCVMCAGAMIHSRIGRVVFGVRNAKTGAAGSLMDVLHYP GMNHRVEITEGILADECAALLCYFFRMPRQVFNAQKKAQSSTD (SEQ ID NO: 1). The combination of alterations contains I76Y, V82T, Y123H, Y147R, F149Y, and Q154R. The adenosine deaminase has at least 85% sequence identity to TadA*7.10.

[0014] In another aspect, the disclosure features base editor containing a nucleic acid programmable DNA binding protein (napDNAbp) and an adenosine deaminase. The adenosine deaminase contains a combination of alterations relative to TadA*7.10: MSEVEFSHEYWMRHALTLAKRARDEREVPVGAVLVLNNRVIGEGWNRAIGLHDPTAHAEIMA LRQGGLVMQNYRLIDATLYVTFEPCVMCAGAMIHSRIGRVVFGVRNAKTGAAGSLMDVLHYP GMNHRVEITEGILADECAALLCYFFRMPRQVFNAQKKAQSSTD (SEQ ID NO: 1). The combination of alterations contains I76Y, V82T, Y123H, Y147D, F149Y, Q154R, T166I, and D167N. The adenosine deaminase has at least 85% sequence identity to TadA*7.10.

[0015] In another aspect, the disclosure features polynucleotide encoding the adenosine deaminase polypeptide or base editor of any aspect of the disclosure or embodiments thereof.

[0016] In another aspect, the disclosure features method of altering a nucleobase of a polynucleotide. The method involves contacting the polynucleotide with the base editor of any aspect of the disclosure, or embodiments thereof, thereby altering a nucleobase of the polynucleotide.

[0017] In another aspect, the disclosure features a base editor system containing the base editor of any aspect of the disclosure, or embodiments thereof, or one or more polynucleotides encoding the base editor, and a guide polynucleotide, or a polynucleotide encoding the guide polynucleotide, that targets the base editor to effect an alteration to a polynucleotide associated with a genetic disorder.

[0018] In another aspect, the disclosure features a base editor system containing the base editor of any aspect of the disclosure, or embodiments thereof, or one or more polynucleotides encoding the base editor, and two or more guide polynucleotides, or one or more polynucleotides encoding the two or more guide polynucleotides. One of the guide polynucleotides targets the base editor to effect an alteration to a beta globin polynucleotide (HBB) that results in expression of a beta globin polypeptide having an alanine at position 6 (Hb G-Makassar). Another of the guide polynucleotides targets the base editor to effect an alteration in a cluster of differentiation (CD117) polynucleotide that results in expression of a CD117 polypeptide with reduced binding to an antibody that selectively binds a wild type CD117 polypeptide.

[0019] In another aspect, the disclosure features kit suitable for use in the method of any one of the above claims, where the kit contains the base editor of any aspect of the disclosure, or embodiments thereof, or a polynucleotide encoding the base editor.

[0020] In any aspect of the disclosure, or embodiments thereof, the combination of alterations further contains an alteration selected from one or more of I76Y, Y123H, Y147R, and Q154R. In any aspect of the disclosure, or embodiments thereof, the combination of alterations contains I76Y, V82T, Y123H, Y147R, F149Y, and Q154R. In any aspect of the disclosure, or embodiments thereof, the adenosine deaminase has at least 90% or 95% identity to TadA*7.10. In any aspect of the disclosure, or embodiments thereof, the adenosine deaminase contains the following amino acid sequence: SEVEFSHEYWMRHALTLAKRARDEREVPVGAVLVLNNRVIGEGWNRAIGLHDPTAHAEIMAL RQGGLVMQNYRLYDATLYTTFEPCVMCAGAMIHSRIGRVVFGVRNAKTGAAGSLMDVLHHPG MNHRVEITEGILADECAALLCRFYRMPRRVFNAQKKAQSSTD (SEQ ID NO: 518). In any aspect of the disclosure, or embodiments thereof, the combination of alterations contains F149Y, T166I, and D167N. In any aspect of the disclosure, or embodiments thereof, the combination of alterations further contains the following additional alterations: I76Y, Y123H, Y147D, and Q154R. In any aspect of the disclosure, or embodiments thereof, the combination of alterations contains I76Y, V82T, Y123H, Y147D, F149Y, Q154R, T166I, and D167N. In any aspect of the disclosure, or embodiments thereof, the adenosine deaminase contains the following amino acid sequence:

(SEQ ID NO: 519)
SEVEFSHEYWMRHALTLAKRARDEREVPVGAVLVLNNRVIGEGWNRAIGL
HDPTAHAEIMALRQGGLVMQNYRLYDATLYTTFEPCVMCAGAMIHSRIGR
VVFGVRNAKTGAAGSLMDVLHHPGMNHRVEITEGILADECAALLCDFYRM
PRRVFNAQKKAQSSIN.

[0021] In any aspect of the disclosure, or embodiments thereof, the two or more guide polynucleotides contain a spacer nucleotide sequence selected from one or more of: UUCUCCACAGGAGUCAGGUG (SEQ ID NO: 445); ACUUCUCCACAGGAGUCAGG (SEQ ID NO: 446); GACUUCUCCACAGGAGUCAGG (SEQ ID NO: 447); CUUCUCCACAGGAGUCAGG (SEQ ID NO: 448); CUUCUCCACAGGAGUCAGAU (SEQ ID NO: 449); ACUUCUCCACAGGAGUCAGAU (SEQ ID NO: 450); GACUUCUCCACAGGAGUCAGAU (SEQ ID NO: 451); UCUGACUCCUGUGGAGAAGUCU (SEQ ID NO: 452); AGACUUCUCCACAGGAGUCAGA (SEQ ID NO: 453); and UCCACAGGAGUCAGAUGCAC (SEQ ID NO: 454). In any aspect of the disclosure, or embodiments thereof, the two or more guide polynucleotides contain a spacer containing the following sequence UUCUCCACAGGAGUCAGGUG (SEQ ID NO: 445). In any aspect of the disclosure, or embodiments thereof, the two or more guide polynucleotides contain a scaffold with the following nucleotide sequence: GUUUUAGAGCUAGAAAUAGCAAGUUAAAAUAAGGCUAGUCCGUUAUCAACUUGAAAAAGUGG CACCGAGUCGGUGCUUUU (SEQ ID NO: 317). In any aspect of the disclosure, or embodiments thereof, the two or more guide polynucleotides contain a spacer nucleotide sequence selected from those listed in Table 2. In any aspect of the disclosure, or embodiments thereof, the two or more guide polynucleotides contain a spacer nucleotide sequence selected from one or more of:

(SEQ ID NO: 660; CC128)
AAAUAUAAUAGCUGGCAUCA;
(SEQ ID NO: 722; CC200)
AUAAUAGCUGGCAUCACGGU;
(SEQ ID NO: 723; gRNA889)
CCACUAGCUUUCCAAACGGU;
(SEQ ID NO: 724; gRNA908)
GCUGAACUGAUAGUCCACGU;
(SEQ ID NO: 725; gRNA918)
UUUGACAAAGCCCGGAUCAG;
(SEQ ID NO: 726; gRNA923)
UGAAAGUGAGGCCAGGUACU;
(SEQ ID NO: 727; gRNA928)
AAACAGUCAGGUGAGUGAAU;
(SEQ ID ON: 728; gRNA929)
AACUACAGGAGAAAUAUAAU;
and
(SEQ ID NO: 729; gRNA944)
GAUUAAAAGGCACCGAAGGA.

In any aspect of the disclosure, or embodiments thereof, the two or more guide polynucleotides contain a scaffold with a sequence selected from GUUUUAGAGCUAGAAAUAGCAAGUUAAAAUAAGGCUAGUCCGUUAUCAACUUGAAAAAGUGG CACCGAGUCGGUGCmUsmUsmUsU (SEQ ID NO: 521); and GUUUUAGAmGmCmCmGmGmCmGmGmAmAmAmCmGmCmCmGmGmCAAGUUAAAAUAAGGCUAG UCCGUUAmUmCAAmCmUmUGGACUUCGGUCCmAmAmGUGGmCmAmCmCmGmAmGmUmCmGmG mUmGmCmUsmUsmUsmU (SEQ ID NO: 522), where “N” represents any nucleotide, “mN” indicates a 2′-OMe modification of the nucleotide “N”, and “Ns” indicates that the nucleotide “N” is linked to the following nucleotide by a phosphorothioate (PS). In any aspect of the disclosure, or embodiments thereof, the two or more guide polynucleotides contain a polynucleotide sequence selected from mNsmNsmNsNNNNNNNNNNNNNNNNNGUUUUAGAGCUAGAAAUAGCAAGUUAAAAUAAGGCU AGUCCGUUAUCAACUUGAAAAAGUGGCACCGAGUCGGUGCmUsmUsmUsU (SEQ ID NO: 443); and mNsmNsmNsNNNNNNNNNNNNNNNNNGUUUUAGAmGmCmCmGmGmCmGmGmAmAmAmCmGmC mCmGmGmCAAGUUAAAAUAAGGCUAGUCCGUUAmUmCAAmCmUmUGGACUUCGGUCCmAmAm GUGGmCmAmCmCmGmAmGmUmCmGmGmUmGmCmUsmUsmUsmU (SEQ ID NO: 444), where “N” represents any nucleotide, “mN” indicates a 2′-OMe modification of the nucleotide “N”, and “Ns” indicates that the nucleotide “N” is linked to the following nucleotide by a phosphorothioate (PS).

[0022] In any aspect of the disclosure, or embodiments thereof, the napDNAbp contains a variant of SpCas9 having an altered protospacer-adjacent motif (PAM) specificity. In some embodiments, the altered PAM has specificity for the nucleic acid sequence 5′-NGC-3′. In any aspect of the disclosure, or embodiments thereof, the napDNAbp recognizes an NRCH PAM sequence, where R is A or G, and H is A, C, or T. In any aspect of the disclosure, or embodiments thereof, the napDNAbp recognizes the PAM nucleotide sequence CACC. In any aspect of the disclosure, or embodiments thereof, the napDNAbp has at least 85% amino acid sequence identity to the following amino acid sequence: DKKYSIGLAIGTNSVGWAVITDEYKVPSKKFKVLGNTDRHSIKKNLIGALLFDSGETAEATR LKRTARRRYTRRKNRICYLQEIFSNEMAKVDDSFFHRLEESFLVEEDKKHERHPIFGNIVDE VAYHEKYPTIYHLRKKLVDSTDKADLRLIYLALAHMIKFRGHFLIEGDLNPDNSDVDKLFIQ LVQTYNQLFEENPINASGVDAKAILSARLSKSRRLENLIAQLPGEKKNGLFGNLIALSLGLT PNFKSNFDLAEDAKLQLSKDTYDDDLDNLLAQIGDQYADLFLAAKNLSDAILLSDILRVNTE ITKAPLSASMVKRYDEHHQDLTLLKALVRQQLPEKYKEIFFDQSKNGYAGYIDGGASQEEFY KFIKPILEKMDGTEELLVKLNREDLLRKQRTFDNGTIPHQIHLGELHAILRRQGDFYPFLKD NREKIEKILTFRIPYYVGPLARGNSRFAWMTRKSEETITPWNFEEVVDKGASAQSFIERMTN FDKNLPNEKVLPKHSLLYEYFTVYNELTKVKYVTEGMRKPAFLSGEQKKAIVDLLFKTNRKV TVKQLKEDYFKKIECFDSVEISGVEDRFNASLGTYHDLLKIIKDKDFLDNEENEDILEDIVL TLTLFEDREMIEERLKTYAHLFDDKVMKQLKRLRYTGWGRLSRKLINGIRDKQSGKTILDFL KSDGFANRNFMQLIHDDSLTFKEDIQKAQVSGQGDSLHEHIANLAGSPAIKKGILQTVKVVD ELVKVMGGHKPENIVIEMARENQTTQKGQKNSRERMKRIEEGIKELGSQILKEHPVENTQLQ NEKLYLYYLQNGRDMYVDQELDINRLSDYDVDHIVPQSFLKDDSIDNKVLTRSDKNRGKSDN VPSEEVVKKMKNYWRQLLNAKLITQRKFDNLTKAERGGLSELDKAGFIKRQLVETRQITKHV AQILDSRMNTKYDENDKLIREVKVITLKSKLVSDFRKDFQFYKVREINNYHHAHDAYLNAVV GTALIKKYPKLESEFVYGDYKVYDVRKMIAKSEQEIGKATAKYFFYSNIMNFFKTEITLANG EIRKRPLIETNGETGEIVWDKGRDFATVRKVLSMPQVNIVKKTEVQTGGFSKESILPKGNSD KLIARKKDWDPKKYGGFNSPTVAYSVLVVAKVEKGKSKKLKSVKELLGITIMERSSFEKNPI DFLEAKGYKEVKKDLIIKLPKYSLFELENGRKRMLASAGVLQKGNELALPSKYVNFLYLASH YEKLKGSPEDNEQKQLFVEQHKHYLDEIIEQISEFSKRVILADANLDKVLSAYNKHRDKPIR EQAENIIHLFTLTNLGAPAAFKYFDTTINRKQYNTTKEVLDATLIRQSITGLYETRIDLSQL G (SEQ ID NO: 520), and recognizes a CACC PAM sequence.

[0023] In any aspect of the disclosure, or embodiments thereof, the hematopoietic stem cell or progenitor thereof is autologous to the subject. In any aspect of the disclosure, or embodiments thereof, the hematopoietic stem cell or progenitor thereof is allogeneic to the subject. In any aspect of the disclosure, or embodiments thereof, the contacting is in vitro and the method involves administering the edited cell to the subject. In any aspect of the disclosure, or embodiments thereof, the subject is a mammal.

[0024] In any aspect of the disclosure, or embodiments thereof, the hemoglobinopathy is selected from one or more of sickle cell anemia, thalassemia, Fanconi anemia, aplastic anemia, and Wiskott-Aldrich syndrome.

[0025] In any aspect of the disclosure, or embodiments thereof, the deaminase is a monomer or heterodimer. In any aspect of the disclosure, or embodiments thereof, the base editor polypeptide is an internal base editor (IBE) containing the deaminase inserted at an internal location of the napDNAbp.

[0026] In any aspect of the disclosure, or embodiments thereof, the deaminase is fused to the napDNAbp or forms a complex with the napDNAbp. In any aspect of the disclosure, or embodiments thereof, the napDNAbp is a nuclease inactive or nickase variant.

[0027] In any aspect of the disclosure, or embodiments thereof, a) one of the guide polynucleotides contains a spacer sequence selected from one or more of: UUCUCCACAGGAGUCAGGUG (SEQ ID NO: 445); ACUUCUCCACAGGAGUCAGG (SEQ ID NO: 446); GACUUCUCCACAGGAGUCAGG (SEQ ID NO: 447); CUUCUCCACAGGAGUCAGG (SEQ ID NO: 448); CUUCUCCACAGGAGUCAGAU (SEQ ID NO: 449); ACUUCUCCACAGGAGUCAGAU (SEQ ID NO: 450); GACUUCUCCACAGGAGUCAGAU (SEQ ID NO: 451); UCUGACUCCUGUGGAGAAGUCU (SEQ ID NO: 452); AGACUUCUCCACAGGAGUCAGA (SEQ ID NO: 453); and UCCACAGGAGUCAGAUGCAC (SEQ ID NO: 454); and b) another of guide polynucleotides contains a spacer sequence selected from one or more of

(SEQ ID NO: 660; CC128)
AAAUAUAAUAGCUGGCAUCA;
(SEQ ID NO: 722; CC200)
AUAAUAGCUGGCAUCACGGU;
(SEQ ID NO: 723; gRNA889)
CCACUAGCUUUCCAAACGGU;
(SEQ ID NO: 724; gRNA908)
GCUGAACUGAUAGUCAACGU;
(SEQ ID NO: 725; gRNA918)
UUUGACAAAGCCCGGAUCAG;
(SEQ ID NO: 726; gRNA923)
UGAAAGUGAGGCCAGGUACU;
(SEQ ID NO: 727; gRNA928)
AAACAGUCAGGUGAGUGAAU;
(SEQ ID NO: 728; gRNA929)
AACUACAGGAGAAAUAUAAU;
and
(SEQ ID NO: 729; gRNA944)
GAUUAAAAGGCACCGAAGGA.

[0028] In any aspect of the disclosure, or embodiments thereof, the base editor contains the following amino acid sequence:

(SEQ ID NO: 524)
MSEVEFSHEYWMRHALTLAKRARDEREVPVGAVLVLNNRVIGEGWNRAIG
LHDPTAHAEIMALRQGGLVMQNYRLYDATLYTTFEPCVMCAGAMIHSRIG
RVVFGVRNAKTGAAGSLMDVLHHPGMNHRVEITEGILADECAALLCRFYR
MPRRVFNAQKKAQSSTDSGGSSGGSSGSETPGTSESATPESSGGSSGGSD
KKYSIGLAIGTNSVGWAVITDEYKVPSKKFKVLGNTDRHSIKKNLIGALL
FDSGETAEATRLKRTARRRYTRRKNRICYLQEIFSNEMAKVDDSFFHRLE
ESFLVEEDKKHERHPIFGNIVDEVAYHEKYPTIYHLRKKLVDSTDKADLR
LIYLALAHMIKFRGHFLIEGDLNPDNSDVDKLFIQLVQTYNQLFEENPIN
ASGVDAKAILSARLSKSRRLENLIAQLPGEKKNGLFGNLIALSLGLTPNF
KSNFDLAEDAKLQLSKDTYDDDLDNLLAQIGDQYADLFLAAKNLSDAILL
SDILRVNTEITKAPLSASMVKRYDEHHQDLTLLKALVRQQLPEKYKEIFF
DQSKNGYAGYIDGGASQEEFYKFIKPILEKMDGTEELLVKLNREDLLRKQ
RTFDNGIIPHQIHLGELHAILRRQGDFYPFLKDNREKIEKILTFRIPYYV
GPLARGNSRFAWMTRKSEETITPWNFEEVVDKGASAQSFIERMTNFDKNL
PNEKVLPKHSLLYEYFTVYNELTKVKYVTEGMRKPAFLSGEQKKAIVDLL
FKTNRKVTVKQLKEDYFKKIECFDSVEISGVEDRFNASLGTYHDLLKIIK
DKDFLDNEENEDILEDIVLTLTLFEDREMIEERLKTYAHLFDDKVMKQLK
RLRYTGWGRLSRKLINGIRDKQSGKTILDFLKSDGFANRNFMQLIHDDSL
TFKEDIQKAQVSGQGDSLHEHIANLAGSPAIKKGILQTVKVVDELVKVMG
GHKPENIVIEMARENQTTQKGQKNSRERMKRIEEGIKELGSQILKEHPVE
NTQLQNEKLYLYYLQNGRDMYVDQELDINRLSDYDVDHIVPQSFLKDDSI
DNKVLTRSDKNRGKSDNVPSEEVVKKMKNYWRQLLNAKLITQRKFDNLTK
AERGGLSELDKAGFIKRQLVETRQITKHVAQILDSRMNTKYDENDKLIRE
VKVITLKSKLVSDFRKDFQFYKVREINNYHHAHDAYLNAVVGTALIKKYP
KLESEFVYGDYKVYDVRKMIAKSEQEIGKATAKYFFYSNIMNFFKTEITL
ANGEIRKRPLIETNGETGEIVWDKGRDFATVRKVLSMPQVNIVKKTEVQT
GGFSKESILPKGNSDKLIARKKDWDPKKYGGFNSPTVAYSVLVVAKVEKG
KSKKLKSVKELLGITIMERSSFEKNPIDFLEAKGYKEVKKDLIIKLPKYS
LFELENGRKRMLASAGVLQKGNELALPSKYVNFLYLASHYEKLKGSPEDN
EQKQLFVEQHKHYLDEIIEQISEFSKRVILADANLDKVLSAYNKHRDKPI
REQAENIIHLFTLTNLGAPAAFKYFDTTINRKQYNTTKEVLDATLIRQSI
TGLYETRIDLSQLGGDEGADKRTADGSEFESPKKKRKV.

[0029] In any aspect of the disclosure, or embodiments thereof, the base editor contains the following amino acid sequence:

(SEQ ID NO: 525)
MSEVEFSHEYWMRHALTLAKRARDEREVPVGAVLVLNNRVIGEGWNRAIG
LHDPTAHAEIMALRQGGLVMQNYRLYDATLYTTFEPCVMCAGAMIHSRIG
RVVFGVRNAKTGAAGSLMDVLHHPGMNHRVEITEGILADECAALLCDFYR
MPRRVFNAQKKAQSSINSGGSSGGSSGSETPGTSESATPESSGGSSGGSD
KKYSIGLAIGTNSVGWAVITDEYKVPSKKFKVLGNTDRHSIKKNLIGALL
FDSGETAEATRLKRTARRRYTRRKNRICYLQEIFSNEMAKVDDSFFHRLE
ESFLVEEDKKHERHPIFGNIVDEVAYHEKYPTIYHLRKKLVDSTDKADLR
LIYLALAHMIKFRGHFLIEGDLNPDNSDVDKLFIQLVQTYNQLFEENPIN
ASGVDAKAILSARLSKSRRLENLIAQLPGEKKNGLFGNLIALSLGLTPNF
KSNFDLAEDAKLQLSKDTYDDDLDNLLAQIGDQYADLFLAAKNLSDAILL
SDILRVNTEITKAPLSASMVKRYDEHHQDLTLLKALVRQQLPEKYKEIFF
DQSKNGYAGYIDGGASQEEFYKFIKPILEKMDGTEELLVKLNREDLLRKQ
RTFDNGIIPHQIHLGELHAILRRQGDFYPFLKDNREKIEKILTFRIPYYV
GPLARGNSRFAWMTRKSEETITPWNFEEVVDKGASAQSFIERMTNFDKNL
PNEKVLPKHSLLYEYFTVYNELTKVKYVTEGMRKPAFLSGEQKKAIVDLL
FKTNRKVTVKQLKEDYFKKIECFDSVEISGVEDRFNASLGTYHDLLKIIK
DKDFLDNEENEDILEDIVLTLTLFEDREMIEERLKTYAHLFDDKVMKQLK
RLRYTGWGRLSRKLINGIRDKQSGKTILDFLKSDGFANRNFMQLIHDDSL
TFKEDIQKAQVSGQGDSLHEHIANLAGSPAIKKGILQTVKVVDELVKVMG
GHKPENIVIEMARENQTTQKGQKNSRERMKRIEEGIKELGSQILKEHPVE
NTQLQNEKLYLYYLQNGRDMYVDQELDINRLSDYDVDHIVPQSFLKDDSI
DNKVLTRSDKNRGKSDNVPSEEVVKKMKNYWRQLLNAKLITQRKFDNLTK
AERGGLSELDKAGFIKRQLVETRQITKHVAQILDSRMNTKYDENDKLIRE
VKVITLKSKLVSDFRKDFQFYKVREINNYHHAHDAYLNAVVGTALIKKYP
KLESEFVYGDYKVYDVRKMIAKSEQEIGKATAKYFFYSNIMNFFKTEITL
ANGEIRKRPLIETNGETGEIVWDKGRDFATVRKVLSMPQVNIVKKTEVQT
GGFSKESILPKGNSDKLIARKKDWDPKKYGGFNSPTVAYSVLVVAKVEKG
KSKKLKSVKELLGITIMERSSFEKNPIDFLEAKGYKEVKKDLIIKLPKYS
LFELENGRKRMLASAGVLQKGNELALPSKYVNFLYLASHYEKLKGSPEDN
EQKQLFVEQHKHYLDEIIEQISEFSKRVILADANLDKVLSAYNKHRDKPI
REQAENIIHLFTLTNLGAPAAFKYFDTTINRKQYNTTKEVLDATLIRQSI
TGLYETRIDLSQLGGDEGADKRTADGSEFESPKKKRKV.

[0030] In any aspect provided herein, or embodiments thereof, the method is not a process for modifying the germline genetic identity of human beings.

### Definitions

[0031] Unless defined otherwise, all technical and scientific terms used herein have the meaning commonly understood by a person skilled in the art to which this disclosure belongs. The following references provide one of skill with a general definition of many of the terms used in this disclosure: Singleton et al., Dictionary of Microbiology and Molecular Biology (2nd ed. 1994); The Cambridge Dictionary of Science and Technology (Walker ed., 1988); The Glossary of Genetics, 5th Ed., R. Rieger et al. (eds.), Springer Verlag (1991); and Hale & Marham, The Harper Collins Dictionary of Biology (1991). As used herein, the following terms have the meanings ascribed to them below, unless specified otherwise.

[0032] By “ABTx052” or “mAb-7” is meant an antibody having at least about 85% amino acid sequence identity to an antibody sequence of antibody ABTx052 or comprising VH and/or VL CDRs 1-3 of ABTx052 or antigen binding fragments thereof, wherein each of the antibody, CDRs, and antigen binding fragments specifically bind to a wild type CD117 polypeptide but fail to detectably bind or have only reduced binding to an altered CD117 polypeptide. In embodiments, the antibody or antigen binding fragment thereof has at least 90%, 93%, 95%, 98%, 99% or 100% amino acid sequence identity to an antibody sequence of antibody ABTx052. In embodiments, ABTx052 selectively binds a wild type CD117 polypeptide. Exemplary heavy chain and light chain sequences for antibody ABTx052 are provided below, where embodiments of the variable regions are in plain text, embodiments of the constant domains are in bold, and embodiments of complementarity determining regions (CDRs), i.e., CDR1, CDR2, and CDR2, are underlined:

ABTx052 heavy chain (HC):
(SEQ ID NO: 419)
QVQLVQSGAAVKKPGESLKISCKGSGYRFTSYWIGWVRQMPGKGLEWMGI
IYPGDSDTRYSPSFQGQVTISAGKSISTAYLQWSSLKASDTAMYYCARHG
RGYNGYEGAFDIWGQGTMVTVSSASTKGPSVFPLAPSSKSTSGGTAALGC
LVKDYFPEPVTVSWNSGALTSGVHTFPAVLQSSGLYSLSSVVTVPSSSLG
TQTYICNVNHKPSNTKVDKKVEPKSCDKTHTCPPCPAPELLGGPSVFLFP
PKPKDTLMISRTPEVTCVVVDVSHEDPEVKFNWYVDGVEVHNAKTKPREE
QYNSTYRVVSVLTVLHQDWLNGKEYKCKVSNKALPAPIEKTISKAKGQPR
EPQVYTLPPSRDELTKNQVSLTCLVKGFYPSDIAVEWESNGQPENNYKTT
PPVLDSDGSFFLYSKLTVDKSRWQQGNVFSCSVMHEALHNHYTQKSLSLS
PG
ABTx052 light chain (LC):
(SEQ ID NO: 420)
AIQLTQSPSSLSASVGDRVTITCRASQGISSALAWYQQKPGKAPKLLIYD
ASSLESGVPSRFSGSGSGTDFTLTISSLQPEDFATYYCQQFNSYPLTFGG
GTKVEIKRTVAAPSVFIFPPSDEQLKSGTASVVCLLNNFYPREAKVQWKV
DNALQSGNSQESVTEQDSKDSTYSLSSTLTLSKADYEKHKVYACEVTHQG
LSSPVTKSFNRGEC.

[0033] The three CDRs of the ABTx052 antibody VH region are as follows:

VH CDR1:
(SEQ ID NO: 421)
GYRFTSYW;
VH CDR2:
(SEQ ID NO: 422)
IYPGDSDT
or
(SEQ ID NO: 958)
IYPGDSDTR;
and
VH CDR3:
(SEQ ID NO: 423)
ARHGRGYNGYEGAFDI.

[0034] The three CDRs of the ABTx052 antibody VL region are as follows:

VL CDR1:
(SEQ ID NO: 424)
QGISSA;
VL CDR2:
DAS;
and
VL CDR3:
(SEQ ID NO: 425)
QQFNSYPLT.

[0035] The four framework (FR) regions, i.e., FR1, FR2, FR3, and FR4, of the ABTx052 antibody are located on either side of each of the CDRs in VH and VL region sequences shown supra. In particular, the four FRs of the ABTx052 antibody VH region are as follows:

VH FR1:
(SEQ ID NO: 426)
QVQLVQSGAAVKKPGESLKISCKGS;
VH FR2:
(SEQ ID NO: 427)
IGWVRQMPGKGLEWMGI;
and
VH FR3:
(SEQ ID NO: 428)
RYSPSFQGQVTISAGKSISTAYLQWSSLKASDTAMYYC
or
(SEQ ID NO: 973)
YSPSFQGQVTISAGKSISTAYLQWSSLKASDTAMYYC;
VH FR4:
(SEQ ID NO: 429)
WGQGTMVTVSS.

[0036] The four FRs of the ABTx052 antibody VL region are as follows:

(SEQ ID NO: 433)
VL FR1:
(SEQ ID NO: 430)
AIQLTQSPSSLSASVGDRVTITCRAS;
VL FR2:
(SEQ ID NO: 431)
LAWYQQKPGKAPKLLIY;
VL FR3:
(SEQ ID NO: 432)
SLESGVPSRFSGSGSGTDFTLTISSLQPEDFATYYC;
and
VL FR4:
(SEQ ID NO: 429)
FGGGTKVEIKRTV.

[0037] By “ABTx052 polynucleotide” is meant a nucleic acid molecule (e.g., DNA) encoding at least a fragment of an ABTx052 antibody. In an embodiment, the encoded fragment has antigen binding activity.

[0038] By “adenine” or “9H-Purin-6-amine” is meant a purine nucleobase with the molecular formula C₅H₅N₅, having the structure

[chemical structure]

and corresponding to CAS No. 73-24-5.

[0039] By “adenosine” or “4-Amino-1-[(2R,3R,4S,5R)-3,4-dihydroxy-5-(hydroxymethyl)oxolan-2-yl]pyrimidin-2(1H)-one” is meant an adenine molecule attached to a ribose sugar via a glycosidic bond, having the structure

[chemical structure]

and corresponding to CAS No. 65-46-3. Its molecular formula is C₁₀H₁₃N₅O₄.

[0040] By “adenosine deaminase” or “adenine deaminase” is meant a polypeptide or fragment thereof capable of catalyzing the hydrolytic deamination of adenine or adenosine. In some embodiments, the deaminase or deaminase domain is an adenosine deaminase catalyzing the hydrolytic deamination of adenosine to inosine or deoxy adenosine to deoxyinosine. In some embodiments, the adenosine deaminase catalyzes the hydrolytic deamination of adenine or adenosine in deoxyribonucleic acid (DNA). The adenosine deaminases (e.g., engineered adenosine deaminases, evolved adenosine deaminases) provided herein may be from any organism (e.g., eukaryotic, prokaryotic), including but not limited to algae, bacteria, fungi, plants, invertebrates (e.g., insects), and vertebrates (e.g., amphibians, mammals). In embodiments, the adenosine deaminase variant is selected from those described in PCT/US2020/018192, PCT/US2020/049975, PCT/US2017/045381, and PCT/US2020/028568, the full contents of which are each incorporated herein by reference in their entireties for all purposes.

[0041] By “adenosine deaminase activity” is meant catalyzing the deamination of adenine or adenosine to guanine in a polynucleotide. In some embodiments, an adenosine deaminase variant as provided herein maintains adenosine deaminase activity (e.g., at least about 30%, 40%, 50%, 60%, 70%, 80%, 90% or more of the activity of a reference adenosine deaminase (e.g., TadA*8.20 or TadA*8.19)).

[0042] By “Adenosine Base Editor (ABE)” is meant a base editor comprising an adenosine deaminase.

[0043] By “Adenosine Base Editor (ABE) polynucleotide” is meant a polynucleotide encoding an ABE. By “Adenosine Base Editor 8 (ABE8) polypeptide” or “ABE8” is meant a base editor as defined herein comprising an adenosine deaminase or adenosine deaminase variant comprising one or more of the alterations listed in Table 5B, one of the combinations of alterations listed in Table 5B, or an alteration at one or more of the amino acid positions listed in Table 5B, such alterations are relative to the following reference sequence: MSEVEFSHEYWMRHALTLAKRARDEREVPVGAVLVLNNRVIGEGWNRAIGLHDPTAHAEIMA LRQGGLVMQNYRLIDATLYVTFEPCVMCAGAMIHSRIGRVVFGVRNAKTGAAGSLMDVLHYP GMNHRVEITEGILADECAALLCYFFRMPRQVFNAQKKAQSSTD (SEQ ID NO: 1), or a corresponding position in another adenosine deaminase. In embodiments, ABE8 comprises alterations at amino acids 82 and/or 166 of SEQ ID NO: 1 In some embodiments, ABE8 comprises further alterations, as described herein, relative to the reference sequence.

[0044] By “Adenosine Base Editor 8 (ABE8) polynucleotide” is meant a polynucleotide encoding an ABE8 polypeptide.

[0045] “Administering” is referred to herein as providing one or more compositions described herein to a patient or a subject. By way of example and without limitation, composition administration (e.g., injection) can be performed by intravenous (i.v.) injection, sub-cutaneous (s.c.) injection, intradermal (i.d.) injection, intraperitoneal (i.p.) injection, or intramuscular (i.m.) injection. One or more such routes can be employed. Parenteral administration can be, for example, by bolus injection or by gradual perfusion over time. In some embodiments, parenteral administration includes infusing or injecting intravascularly, intravenously, intramuscularly, intraarterially, intrathecally, intratumorally, intradermally, intraperitoneally, transtracheally, subcutaneously, subcuticularly, intraarticularly, subcapsularly, subarachnoidly and intrasternally. Alternatively, or concurrently, administration can be by the oral route.

[0046] By “agent” is meant any small molecule chemical compound, antibody, nucleic acid molecule, or polypeptide, or fragments thereof.

[0047] By “alteration” is meant a change in the level, structure, or activity of an analyte, gene or polypeptide as detected by standard art known methods such as those described herein. As used herein, an alteration includes a change (e.g., increase or decrease) in expression levels. In embodiments, the increase or decrease in expression levels is by 10%, 25%, 40%, 50% or greater. In some embodiments, an alteration includes an insertion, deletion, or substitution of a nucleobase or amino acid (by, e.g., genetic engineering).

[0048] By “ameliorate” is meant decrease, suppress, attenuate, diminish, arrest, or stabilize the development or progression of a disease.

[0049] By “analog” is meant a molecule that is not identical but has analogous functional or structural features. For example, a polypeptide analog retains the biological activity of a corresponding naturally-occurring polypeptide, while having certain biochemical modifications that enhance the analog's function relative to a naturally occurring polypeptide. Such biochemical modifications could increase the analog's protease resistance, membrane permeability, or half-life, without altering, for example, ligand binding. An analog may include an unnatural amino acid.

[0050] As used herein, the term “antibody” refers to an immunoglobulin molecule that specifically binds to, or is immunologically reactive with, a particular antigen, and includes polyclonal, monoclonal, genetically engineered, and otherwise modified forms of antibodies, including but not limited to chimeric antibodies, humanized antibodies, heteroconjugate antibodies (e.g., bi- tri- and quad-specific antibodies, diabodies, triabodies, and tetrabodies), and antigen binding fragments of antibodies, including, for example, Fab′, F(ab′)2, Fab, Fv, rlgG, and scFv fragments. Unless otherwise indicated, the term “monoclonal antibody” (mAb) is meant to include both intact molecules, as well as antibody fragments (including, for example, Fab and F(ab′)2 fragments) that are capable of specifically binding to a target protein. As used herein, the Fab and F(ab′)2 fragments refer to antibody fragments that lack the Fc fragment of an intact antibody.

[0051] Antibodies (immunoglobulins) comprise two heavy chains linked together by disulfide bonds, and two light chains, with each light chain being linked to a respective heavy chain by disulfide bonds in a “Y” shaped configuration. Each heavy chain has at one end a variable domain (VH) followed by a number of constant domains (CH). Each light chain has a variable domain (VL) at one end and a constant domain (CL) at its other end. The variable domain of the light chain (VL) is aligned with the variable domain of the heavy chain (VL), and the light chain constant domain (CL) is aligned with the first constant domain of the heavy chain (CH1). The variable domains of each pair of light and heavy chains form the antigen binding site. The isotype of the heavy chain (gamma, alpha, delta, epsilon or mu) determines the immunoglobulin class (IgG, IgA, IgD, IgE or IgM, respectively). The light chain is either of two isotypes (kappa (κ) or lambda (λ)) found in all antibody classes. The terms “antibody” or “antibodies” include intact antibodies, such as polyclonal antibodies or monoclonal antibodies (mAbs), as well as proteolytic portions or fragments thereof, such as the Fab or F(ab′)2 fragments, that are capable of specifically binding to a target protein. Antibodies may include chimeric antibodies; recombinant and engineered antibodies, and antigen binding fragments thereof. Exemplary functional antibody fragments comprising whole or essentially whole variable regions of both the light and heavy chains are defined as follows: (i) Fv, defined as a genetically engineered fragment consisting of the variable region of the light chain and the variable region of the heavy chain expressed as two chains; (ii) single-chain Fv (“scFv”), a genetically engineered single-chain molecule including the variable region of the light chain and the variable region of the heavy chain, linked by a suitable polypeptide linker; (iii) Fab, a fragment of an antibody molecule containing a monovalent antigen-binding portion of an antibody molecule, obtained by treating an intact antibody with the enzyme papain to yield the intact light chain and the Fd fragment of the heavy chain, which consists of the variable and CH1 domains thereof; (iv) Fab′, a fragment of an antibody molecule containing a monovalent antigen-binding portion of an antibody molecule, obtained by treating an intact antibody with the enzyme pepsin, followed by reduction (two Fab′ fragments are generated per antibody molecule); and (v) F(ab′)2, a fragment of an antibody molecule containing a monovalent antigen-binding portion of an antibody molecule, obtained by treating an intact antibody with the enzyme pepsin (i.e., a dimer of Fab′ fragments held together by two disulfide bonds).

[0052] By “base editor (BE),” or “nucleobase editor polypeptide (NBE)” is meant an agent that binds a polynucleotide and has nucleobase modifying activity. In various embodiments, the base editor comprises a nucleobase modifying polypeptide (e.g., a deaminase) and a polynucleotide programmable nucleotide binding domain (e.g., Cas9 or Cpf1). Representative nucleic acid and protein sequences of base editors include those sequences having about or at least about 85% sequence identity to any base editor sequence provided in the sequence listing, such as those corresponding to SEQ ID NOs: 2-11.

[0053] By “base editing activity” is meant acting to chemically alter a base within a polynucleotide. In one embodiment, a first base is converted to a second base. In one embodiment, the base editing activity is adenosine or adenine deaminase activity, e.g., converting A•T to G•C.

[0054] The term “base editor system” refers to an intermolecular complex for editing a nucleobase of a target nucleotide sequence. In various embodiments, the base editor (BE) system comprises (1) a polynucleotide programmable nucleotide binding domain, a deaminase domain (e.g., adenosine deaminase) for deaminating nucleobases in the target nucleotide sequence; and (2) one or more guide polynucleotides (e.g., guide RNA) in conjunction with the polynucleotide programmable nucleotide binding domain. In various embodiments, the base editor (BE) system comprises a nucleobase editor domain selected from an adenosine deaminase, and a domain having nucleic acid sequence specific binding activity. In some embodiments, the base editor system comprises (1) a base editor (BE) comprising a polynucleotide programmable DNA binding domain and a deaminase domain for deaminating one or more nucleobases in a target nucleotide sequence; and (2) one or more guide RNAs in conjunction with the polynucleotide programmable DNA binding domain. In some embodiments, the polynucleotide programmable nucleotide binding domain is a polynucleotide programmable DNA binding domain. In some embodiments, the base editor is an adenine or adenosine base editor (ABE).

[0055] By “ß-globin (HBB) polypeptide” is meant a polypeptide having at least about 85% amino acid sequence identity to NCBI Accession No. NP_000509, provided below, or a fragment thereof capable of forming a dimer with a HBA1 polypeptide. In particular embodiments, a ß-globin protein comprises one or more alterations relative to the following reference sequence. In one particular embodiment, a ß-globin protein associated with sickle cell disease comprises an E6V (also termed E7V) mutation.

(SEQ ID NO: 426)
MVHLTPEEKSAVTALWGKVNVDEVGGEALGRLLVVYPWTQRFFESFGDLS
TPDAVMGNPKVKAHGKKVLGAFSDGLAHLDNLKGTFATLSELHCDKLHVD
PENFRLLGNVLVCVLAHHFGKEFTPPVQAAYQKVVAGVANALAHKYH.

[0056] By HBB polynucleotide” is meant a nucleic acid molecule that encodes an HBB polypeptide as well as the introns, exons, 3′ untranslated regions, 5′ untranslated regions, and regulatory sequences associated with its expression, or fragments thereof. In embodiments, a HBB polynucleotide is the genomic sequence, cDNA, mRNA, or gene associated with and/or required for HBB expression. Exemplary HBB polynucleotide sequences from Homo sapiens are provided below (NCBI Ref. Seq. Accessions No. NM_000518 and NG_059281).

(SEQ ID NO: 427)
ACATTTGCTTCTGACACAACTGTGTTCACTAGCAACCTCAAACAGACACC
ATGGTGCATCTGACTCCTGAGGAGAAGTCTGCCGTTACTGCCCTGTGGGG
CAAGGTGAACGTGGATGAAGTTGGTGGTGAGGCCCTGGGCAGGCTGCTGG
TGGTCTACCCTTGGACCCAGAGGTTCTTTGAGTCCTTTGGGGATCTGTCC
ACTCCTGATGCTGTTATGGGCAACCCTAAGGTGAAGGCTCATGGCAAGAA
AGTGCTCGGTGCCTTTAGTGATGGCCTGGCTCACCTGGACAACCTCAAGG
GCACCTTTGCCACACTGAGTGAGCTGCACTGTGACAAGCTGCACGTGGAT
CCTGAGAACTTCAGGCTCCTGGGCAACGTGCTGGTCTGTGTGCTGGCCCA
TCACTTTGGCAAAGAATTCACCCCACCAGTGCAGGCTGCCTATCAGAAAG
TGGTGGCTGGTGTGGCTAATGCCCTGGCCCACAAGTATCACTAAGCTCGC
TTTCTTGCTGTCCAATTTCTATTAAAGGTTCCTTTGTTCCCTAAGTCCAA
CTACTAAACTGGGGGATATTATGAAGGGCCTTGAGCATCTGGATTCTGCC
TAATAAAAAACATTTATTTTCATTGCAA.

[0057] By “cluster of differentiation 117 (CD117; C-kit; SCFR) polypeptide” is meant a polypeptide having at least about 85% amino acid sequence identity to an amino acid sequence provided at GenBank Accession No. NP_000213, which is provided below, or a fragment thereof that binds an anti-CD117 antibody. CD117 (KIT) is a type III receptor tyrosine kinase operating in cell signal transduction in several cell types. Normally KIT is activated (phosphorylated) by binding of its ligand, the stem cell factor (SCF). This leads to a phosphorylation cascade ultimately activating various transcription factors in different cell types. Such activation regulates apoptosis, cell differentiation, proliferation, chemotaxis, and cell adhesion. In some embodiments, an CD117 polypeptide or fragment thereof has SCF signaling activity.

>NP_000213.1 mast/stem cell growth factor receptor Kit isoform 1 precursor [Homo sapiens]
(SEQ ID NO: 526)
[sequence omitted]
>CD117 variant with S261G alteration and N260D alteration (shown in bold-underline)
(SEQ ID NO: 527)
MRGARGAWDFLCVLLLLLRVQTGSSQPSVSPGEPSPPSIHPGKSDLIVRVGDEIRLLCTDPG
FVKWTFEILDETNENKQNEWITEKAEATNTGKYTCTNKHGLSNSIYVFVRDPAKLFLVDRSL
YGKEDNDTLVRCPLTDPEVTNYSLKGCQGKPLPKDLRFIPDPKAGIMIKSVKRAYHRLCLHC
SVDQEGKSVLSEKFILKVRPAFKAVPVVSVSKASYLLREGEEFTVTCTIKDVSSSVYSTWKR
ENSQTKLQEKY [symbol] WHHGDFNYERQATLTISSARVNDSGVFMCYANNTFGSANVTTTLEVVDK
GFINIFPMINTTVFVNDGENVDLIVEYEAFPKPEHQQWIYMNRTFTDKWEDYPKSENESNIR
YVSELHLTRLKGTEGGTYTFLVSNSDVNAAIAFNVYVNTKPEILTYDRLVNGMLQCVAAGFP
EPTIDWYFCPGTEQRCSASVLPVDVQTLNSSGPPFGKLVVQSSIDSSAFKHNGTVECKAYND
1
VGKTSAYFNFAFKGNNKEQIHPHTLFTPLLIGFVIVAGMMCIIVMILTYKYLQKPMYEVQWK
VVEEINGNNYVYIDPTQLPYDHKWEFPRNRLSFGKTLGAGAFGKVVEATAYGLIKSDAAMTV
AVKMLKPSAHLTEREALMSELKVLSYLGNHMNIVNLLGACTIGGPTLVITEYCCYGDLLNFL
RRKRDSFICSKQEDHAEAALYKNLLHSKESSCSDSTNEYMDMKPGVSYVVPTKADKRRSVRI
GSYIERDVTPAIMEDDELALDLEDLLSFSYQVAKGMAFLASKNCIHRDLAARNILLTHGRIT
KICDFGLARDIKNDSNYVVKGNARLPVKWMAPESIFNCVYTFESDVWSYGIFLWELFSLGSS
PYPGMPVDSKFYKMIKEGFRMLSPEHAPAEMYDIMKTCWDADPLKRPTFKQIVQLIEKQISE
STNHIYSNLANCSPNRQKPVVDHSVRINSVGSTASSSQPLLVHDDV
>CD117 variant with S261G alteration (shown in bold-underline)
(SEQ ID NO: 528)
MRGARGAWDFLCVLLLLLRVQTGSSQPSVSPGEPSPPSIHPGKSDLIVRVGDEIRLLCTDPG
FVKWTFEILDETNENKQNEWITEKAEATNTGKYTCTNKHGLSNSIYVFVRDPAKLFLVDRSL
YGKEDNDTLVRCPLTDPEVTNYSLKGCQGKPLPKDLRFIPDPKAGIMIKSVKRAYHRLCLHC
SVDQEGKSVLSEKFILKVRPAFKAVPVVSVSKASYLLREGEEFTVTCTIKDVSSSVYSTWKR
ENSQTKLQEKYNGWHHGDFNYERQATLTISSARVNDSGVFMCYANNTFGSANVTTTLEVVDK
GFINIFPMINTTVFVNDGENVDLIVEYEAFPKPEHQQWIYMNRTFTDKWEDYPKSENESNIR
YVSELHLTRLKGTEGGTYTFLVSNSDVNAAIAFNVYVNTKPEILTYDRLVNGMLQCVAAGFP
EPTIDWYFCPGTEQRCSASVLPVDVQTLNSSGPPFGKLVVQSSIDSSAFKHNGTVECKAYND
VGKTSAYFNFAFKGNNKEQIHPHTLFTPLLIGFVIVAGMMCIIVMILTYKYLQKPMYEVQWK
VVEEINGNNYVYIDPTQLPYDHKWEFPRNRLSFGKTLGAGAFGKVVEATAYGLIKSDAAMTV
AVKMLKPSAHLTEREALMSELKVLSYLGNHMNIVNLLGACTIGGPTLVITEYCCYGDLLNFL
RRKRDSFICSKQEDHAEAALYKNLLHSKESSCSDSTNEYMDMKPGVSYVVPTKADKRRSVRI
GSYIERDVTPAIMEDDELALDLEDLLSFSYQVAKGMAFLASKNCIHRDLAARNILLTHGRIT
KICDFGLARDIKNDSNYVVKGNARLPVKWMAPESIFNCVYTFESDVWSYGIFLWELFSLGSS
PYPGMPVDSKFYKMIKEGFRMLSPEHAPAEMYDIMKTCWDADPLKRPTFKQIVQLIEKQISE
STNHIYSNLANCSPNRQKPVVDHSVRINSVGSTASSSQPLLVHDDV
>CD117 variant with Y259C and N260D alterations (shown in bold-underline)
(SEQ ID NO: 529)
MRGARGAWDFLCVLLLLLRVQTGSSQPSVSPGEPSPPSIHPGKSDLIVRVGDEIRLLCTDPG
FVKWTFEILDETNENKQNEWITEKAEATNTGKYTCTNKHGLSNSIYVFVRDPAKLFLVDRSL
YGKEDNDTLVRCPLTDPEVTNYSLKGCQGKPLPKDLRFIPDPKAGIMIKSVKRAYHRLCLHC
SVDQEGKSVLSEKFILKVRPAFKAVPVVSVSKASYLLREGEEFTVTCTIKDVSSSVYSTWKR
ENSQTKLQEK [symbol] SWHHGDFNYERQATLTISSARVNDSGVFMCYANNTFGSANVTTTLEVVDK
GFINIFPMINTTVFVNDGENVDLIVEYEAFPKPEHQQWIYMNRTFTDKWEDYPKSENESNIR
YVSELHLTRLKGTEGGTYTFLVSNSDVNAAIAFNVYVNTKPEILTYDRLVNGMLQCVAAGFP
EPTIDWYFCPGTEQRCSASVLPVDVQTLNSSGPPFGKLVVQSSIDSSAFKHNGTVECKAYND
VGKTSAYFNFAFKGNNKEQIHPHTLFTPLLIGFVIVAGMMCIIVMILTYKYLQKPMYEVQWK
VVEEINGNNYVYIDPTQLPYDHKWEFPRNRLSFGKTLGAGAFGKVVEATAYGLIKSDAAMTV
AVKMLKPSAHLTEREALMSELKVLSYLGNHMNIVNLLGACTIGGPTLVITEYCCYGDLLNFL
RRKRDSFICSKQEDHAEAALYKNLLHSKESSCSDSTNEYMDMKPGVSYVVPTKADKRRSVRI
GSYIERDVTPAIMEDDELALDLEDLLSFSYQVAKGMAFLASKNCIHRDLAARNILLTHGRIT
KICDFGLARDIKNDSNYVVKGNARLPVKWMAPESIFNCVYTFESDVWSYGIFLWELFSLGSS
PYPGMPVDSKFYKMIKEGFRMLSPEHAPAEMYDIMKTCWDADPLKRPTFKQIVQLIEKQISE
STNHIYSNLANCSPNRQKPVVDHSVRINSVGSTASSSQPLLVHDDV
>CD117 variant with an N260D alteration (shown in bold-underline)
(SEQ ID NO: 530)
MRGARGAWDFLCVLLLLLRVQTGSSQPSVSPGEPSPPSIHPGKSDLIVRVGDEIRLLCTDPG
FVKWTFEILDETNENKQNEWITEKAEATNTGKYTCTNKHGLSNSIYVFVRDPAKLFLVDRSL
YGKEDNDTLVRCPLTDPEVTNYSLKGCQGKPLPKDLRFIPDPKAGIMIKSVKRAYHRLCLHC
SVDQEGKSVLSEKFILKVRPAFKAVPVVSVSKASYLLREGEEFTVTCTIKDVSSSVYSTWKR
ENSQTKLQEKY [symbol] SWHHGDFNYERQATLTISSARVNDSGVFMCYANNTFGSANVTTTLEVVDK
GFINIFPMINTTVFVNDGENVDLIVEYEAFPKPEHQQWIYMNRTFTDKWEDYPKSENESNIR
YVSELHLTRLKGTEGGTYTFLVSNSDVNAAIAFNVYVNTKPEILTYDRLVNGMLQCVAAGFP
EPTIDWYFCPGTEQRCSASVLPVDVQTLNSSGPPFGKLVVQSSIDSSAFKHNGTVECKAYND
VGKTSAYFNFAFKGNNKEQIHPHTLFTPLLIGFVIVAGMMCIIVMILTYKYLQKPMYEVQWK
VVEEINGNNYVYIDPTQLPYDHKWEFPRNRLSFGKTLGAGAFGKVVEATAYGLIKSDAAMTV
AVKMLKPSAHLTEREALMSELKVLSYLGNHMNIVNLLGACTIGGPTLVITEYCCYGDLLNFL
RRKRDSFICSKQEDHAEAALYKNLLHSKESSCSDSTNEYMDMKPGVSYVVPTKADKRRSVRI
GSYIERDVTPAIMEDDELALDLEDLLSFSYQVAKGMAFLASKNCIHRDLAARNILLTHGRIT
KICDFGLARDIKNDSNYVVKGNARLPVKWMAPESIFNCVYTFESDVWSYGIFLWELFSLGSS
PYPGMPVDSKFYKMIKEGFRMLSPEHAPAEMYDIMKTCWDADPLKRPTFKQIVQLIEKQISE
STNHIYSNLANCSPNRQKPVVDHSVRINSVGSTASSSQPLLVHDDV
>CD117 variant with an S251G alteration (shown in bold-underline)
(SEQ ID NO: 531)
MRGARGAWDFLCVLLLLLRVQTGSSQPSVSPGEPSPPSIHPGKSDLIVRVGDEIRLLCTDPG
FVKWTFEILDETNENKQNEWITEKAEATNTGKYTCTNKHGLSNSIYVFVRDPAKLFLVDRSL
YGKEDNDTLVRCPLTDPEVTNYSLKGCQGKPLPKDLRFIPDPKAGIMIKSVKRAYHRLCLHC
SVDQEGKSVLSEKFILKVRPAFKAVPVVSVSKASYLLREGEEFTVTCTIKDVSSSVYSTWKR
EN [symbol] QTKLQEKYNSWHHGDFNYERQATLTISSARVNDSGVFMCYANNTFGSANVTTTLEVVDK
GFINIFPMINTTVFVNDGENVDLIVEYEAFPKPEHQQWIYMNRTFTDKWEDYPKSENESNIR
YVSELHLTRLKGTEGGTYTFLVSNSDVNAAIAFNVYVNTKPEILTYDRLVNGMLQCVAAGFP
EPTIDWYFCPGTEQRCSASVLPVDVQTLNSSGPPFGKLVVQSSIDSSAFKHNGTVECKAYND
VGKTSAYFNFAFKGNNKEQIHPHTLFTPLLIGFVIVAGMMCIIVMILTYKYLQKPMYEVQWK
VVEEINGNNYVYIDPTQLPYDHKWEFPRNRLSFGKTLGAGAFGKVVEATAYGLIKSDAAMTV
AVKMLKPSAHLTEREALMSELKVLSYLGNHMNIVNLLGACTIGGPTLVITEYCCYGDLLNFL
RRKRDSFICSKQEDHAEAALYKNLLHSKESSCSDSTNEYMDMKPGVSYVVPTKADKRRSVRI
GSYIERDVTPAIMEDDELALDLEDLLSFSYQVAKGMAFLASKNCIHRDLAARNILLTHGRIT
KICDFGLARDIKNDSNYVVKGNARLPVKWMAPESIFNCVYTFESDVWSYGIFLWELFSLGSS
PYPGMPVDSKFYKMIKEGFRMLSPEHAPAEMYDIMKTCWDADPLKRPTFKQIVQLIEKQISE
STNHIYSNLANCSPNRQKPVVDHSVRINSVGSTASSSQPLLVHIDDV

[0058] By “cluster of differentiation 117 (CD117; C-kit; SCFR) polynucleotide” is meant a nucleic acid molecule that encodes a CD117 polypeptide as well as the introns, exons, 3′ untranslated regions, 5′ untranslated regions, and regulatory sequences associated with its expression, or fragments thereof. In embodiments, a CD117 polynucleotide is the genomic sequence, cDNA, mRNA, or gene associated with and/or required for CD117 expression. An exemplary CD117 polynucleotide sequence from Homo sapiens is provided below (NCBI Ref. Seq. Accession No. NM_000222.2), and an exemplary CD117 gene sequence is provided at ENSEMBL Accession No. ENSG00000157404.

>NM 000222.2 Homo sapiens KIT proto-oncogene, receptor tyrosine kinase (KIT),
transcript variant 1, mRNA
(SEQ ID NO: 532)
TCTGGGGGCTCGGCTTTGCCGCGCTCGCTGCACTTGGGCGAGAGCTGGAACGTGGACCAGAG
CTCGGATCCCATCGCAGCTACCGCGATGAGAGGCGCTCGCGGCGCCTGGGATTTTCTCTGCG
TTCTGCTCCTACTGCTTCGCGTCCAGACAGGCTCTTCTCAACCATCTGTGAGTCCAGGGGAA
CCGTCTCCACCATCCATCCATCCAGGAAAATCAGACTTAATAGTCCGCGTGGGCGACGAGAT
TAGGCTGTTATGCACTGATCCGGGCTTTGTCAAATGGACTTTTGAGATCCTGGATGAAACGA
ATGAGAATAAGCAGAATGAATGGATCACGGAAAAGGCAGAAGCCACCAACACCGGCAAATAC
ACGTGCACCAACAAACACGGCTTAAGCAATTCCATTTATGTGTTTGTTAGAGATCCTGCCAA
GCTTTTCCTTGTTGACCGCTCCTTGTATGGGAAAGAAGACAACGACACGCTGGTCCGCTGTC
CTCTCACAGACCCAGAAGTGACCAATTATTCCCTCAAGGGGTGCCAGGGGAAGCCTCTTCCC
AAGGACTTGAGGTTTATTCCTGACCCCAAGGCGGGCATCATGATCAAAAGTGTGAAACGCGC
CTACCATCGGCTCTGTCTGCATTGTTCTGTGGACCAGGAGGGCAAGTCAGTGCTGTCGGAAA
AATTCATCCTGAAAGTGAGGCCAGCCTTCAAAGCTGTGCCTGTTGTGTCTGTGTCCAAAGCA
AGCTATCTTCTTAGGGAAGGGGAAGAATTCACAGTGACGTGCACAATAAAAGATGTGTCTAG
TTCTGTGTACTCAACGTGGAAAAGAGAAAACAGTCAGACTAAACTACAGGAGAAATATAATA
GCTGGCATCACGGTGACTTCAATTATGAACGTCAGGCAACGTTGACTATCAGTTCAGCGAGA
GTTAATGATTCTGGAGTGTTCATGTGTTATGCCAATAATACTTTTGGATCAGCAAATGTCAC
AACAACCTTGGAAGTAGTAGATAAAGGATTCATTAATATCTTCCCCATGATAAACACTACAG
TATTTGTAAACGATGGAGAAAATGTAGATTTGATTGTTGAATATGAAGCATTCCCCAAACCT
GAACACCAGCAGTGGATCTATATGAACAGAACCTTCACTGATAAATGGGAAGATTATCCCAA
GTCTGAGAATGAAAGTAATATCAGATACGTAAGTGAACTTCATCTAACGAGATTAAAAGGCA
CCGAAGGAGGCACTTACACATTCCTAGTGTCCAATTCTGACGTCAATGCTGCCATAGCATTT
AATGTTTATGTGAATACAAAACCAGAAATCCTGACTTACGACAGGCTCGTGAATGGCATGCT
CCAATGTGTGGCAGCAGGATTCCCAGAGCCCACAATAGATTGGTATTTTTGTCCAGGAACTG
AGCAGAGATGCTCTGCTTCTGTACTGCCAGTGGATGTGCAGACACTAAACTCATCTGGGCCA
CCGTTTGGAAAGCTAGTGGTTCAGAGTTCTATAGATTCTAGTGCATTCAAGCACAATGGCAC
GGTTGAATGTAAGGCTTACAACGATGTGGGCAAGACTTCTGCCTATTTTAACTTTGCATTTA
AAGGTAACAACAAAGAGCAAATCCATCCCCACACCCTGTTCACTCCTTTGCTGATTGGTTTC
GTAATCGTAGCTGGCATGATGTGCATTATTGTGATGATTCTGACCTACAAATATTTACAGAA
ACCCATGTATGAAGTACAGTGGAAGGTTGTTGAGGAGATAAATGGAAACAATTATGTTTACA
TAGACCCAACACAACTTCCTTATGATCACAAATGGGAGTTTCCCAGAAACAGGCTGAGTTTT
GGGAAAACCCTGGGTGCTGGAGCTTTCGGGAAGGTTGTTGAGGCAACTGCTTATGGCTTAAT
TAAGTCAGATGCGGCCATGACTGTCGCTGTAAAGATGCTCAAGCCGAGTGCCCATTTGACAG
AACGGGAAGCCCTCATGTCTGAACTCAAAGTCCTGAGTTACCTTGGTAATCACATGAATATT
GTGAATCTACTTGGAGCCTGCACCATTGGAGGGCCCACCCTGGTCATTACAGAATATTGTTG
CTATGGTGATCTTTTGAATTTTTTGAGAAGAAAACGTGATTCATTTATTTGTTCAAAGCAGG
AAGATCATGCAGAAGCTGCACTTTATAAGAATCTTCTGCATTCAAAGGAGTCTTCCTGCAGC
GATAGTACTAATGAGTACATGGACATGAAACCTGGAGTTTCTTATGTTGTCCCAACCAAGGC
CGACAAAAGGAGATCTGTGAGAATAGGCTCATACATAGAAAGAGATGTGACTCCCGCCATCA
TGGAGGATGACGAGTTGGCCCTAGACTTAGAAGACTTGCTGAGCTTTTCTTACCAGGTGGCA
AAGGGCATGGCTTTCCTCGCCTCCAAGAATTGTATTCACAGAGACTTGGCAGCCAGAAATAT
CCTCCTTACTCATGGTCGGATCACAAAGATTTGTGATTTTGGTCTAGCCAGAGACATCAAGA
ATGATTCTAATTATGTGGTTAAAGGAAACGCTCGACTACCTGTGAAGTGGATGGCACCTGAA
AGCATTTTCAACTGTGTATACACGTTTGAAAGTGACGTCTGGTCCTATGGGATTTTTCTTTG
GGAGCTGTTCTCTTTAGGAAGCAGCCCCTATCCTGGAATGCCGGTCGATTCTAAGTTCTACA
AGATGATCAAGGAAGGCTTCCGGATGCTCAGCCCTGAACACGCACCTGCTGAAATGTATGAC
ATAATGAAGACTTGCTGGGATGCAGATCCCCTAAAAAGACCAACATTCAAGCAAATTGTTCA
GCTAATTGAGAAGCAGATTTCAGAGAGCACCAATCATATTTACTCCAACTTAGCAAACTGCA
GCCCCAACCGACAGAAGCCCGTGGTAGACCATTCTGTGCGGATCAATTCTGTCGGCAGCACC
GCTTCCTCCTCCCAGCCTCTGCTTGTGCACGACGATGTCTGAGCAGAATCAGTGTTTGGGTC
ACCCCTCCAGGAATGATCTCTTCTTTTGGCTTCCATGATGGTTATTTTCTTTTCTTTCAACT
TGCATCCAACTCCAGGATAGTGGGCACCCCACTGCAATCCTGTCTTTCTGAGCACACTTTAG
TGGCCGATGATTTTTGTCATCAGCCACCATCCTATTGCAAAGGTTCCAACTGTATATATTCC
CAATAGCAACGTAGCTTCTACCATGAACAGAAAACATTCTGATTTGGAAAAAGAGAGGGAGG
TATGGACTGGGGGCCAGAGTCCTTTCCAAGGCTTCTCCAATTCTGCCCAAAAATATGGTTGA
TAGTTTACCTGAATAAATGGTAGTAATCACAGTTGGCCTTCAGAACCATCCATAGTAGTATG
ATGATACAAGATTAGAAGCTGAAAACCTAAGTCCTTTATGTGGAAAACAGAACATCATTAGA
ACAAAGGACAGAGTATGAACACCTGGGCTTAAGAAATCTAGTATTTCATGCTGGGAATGAGA
CATAGGCCATGAAAAAAATGATCCCCAAGTGTGAACAAAAGATGCTCTTCTGTGGACCACTG
CATGAGCTTTTATACTACCGACCTGGTTTTTAAATAGAGTTTGCTATTAGAGCATTGAATTG
GAGAGAAGGCCTCCCTAGCCAGCACTTGTATATACGCATCTATAAATTGTCCGTGTTCATAC
ATTTGAGGGGAAAACACCATAAGGTTTCGTTTCTGTATACAACCCTGGCATTATGTCCACTG
TGTATAGAAGTAGATTAAGAGCCATATAAGTTTGAAGGAAACAGTTAATACCATTTTTTAAG
GAAACAATATAACCACAAAGCACAGTTTGAACAAAATCTCCTCTTTTAGCTGATGAACTTAT
TCTGTAGATTCTGTGGAACAAGCCTATCAGCTTCAGAATGGCATTGTACTCAATGGATTTGA
TGCTGTTTGACAAAGTTACTGATTCACTGCATGGCTCCCACAGGAGTGGGAAAACACTGCCA
TCTTAGTTTGGATTCTTATGTAGCAGGAAATAAAGTATAGGTTTAGCCTCCTTCGCAGGCAT
GTCCTGGACACCGGGCCAGTATCTATATATGTGTATGTACGTTTGTATGTGTGTAGACAAAT
ATTTGGAGGGGTATTTTTGCCCTGAGTCCAAGAGGGTCCTTTAGTACCTGAAAAGTAACTTG
GCTTTCATTATTAGTACTGCTCTTGTTTCTTTTCACATAGCTGTCTAGAGTAGCTTACCAGA
AGCTTCCATAGTGGTGCAGAGGAAGTGGAAGGCATCAGTCCCTATGTATTTGCAGTTCACCT
GCACTTAAGGCACTCTGTTATTTAGACTCATCTTACTGTACCTGTTCCTTAGACCTTCCATA
ATGCTACTGTCTCACTGAAACATTTAAATTTTACCCTTTAGACTGTAGCCTGGATATTATTC
TTGTAGTTTACCTCTTTAAAAACAAAACAAAACAAAACAAAAAACTCCCCTTCCTCACTGCC
CAATATAAAAGGCAAATGTGTACATGGCAGAGTTTGTGTGTTGTCTTGAAAGATTCAGGTAT
GTTGCCTTTATGGTTTCCCCCTTCTACATTTCTTAGACTACATTTAGAGAACTGTGGCCGTT
ATCTGGAAGTAACCATTTGCACTGGAGTTCTATGCTCTCGCACCTTTCCAAAGTTAACAGAT
TTTGGGGTTGTGTTGTCACCCAAGAGATTGTTGTTTGCCATACTTTGTCTGAAAAATTCCTT
TGTGTTTCTATTGACTTCAATGATAGTAAGAAAAGTGGTTGTTAGTTATAGATGTCTAGGTA
CTTCAGGGGCACTTCATTGAGAGTTTTGTCTTGGATATTCTTGAAAGTTTATATTTTTATAA
TTTTTTCTTACATCAGATGTTTCTTTGCAGTGGCTTAATGTTTGAAATTATTTTGTGGCTTT
TTTTGTAAATATTGAAATGTAGCAATAATGTCTTTTGAATATTCCCAAGCCCATGAGTCCTT
GAAAATATTTTTTATATATACAGTAACTTTATGTGTAAATACATAAGCGGCGTAAGTTTAAA
GGATGTTGGTGTTCCACGTGTTTTATTCCTGTATGTTGTCCAATTGTTGACAGTTCTGAAGA
ATTCTAATAAAATGTACATATATAAATCAAAAAAAAAAAAAAAA
>NG_059281.1: 5001-6608 Homo sapiens hemoglobin subunit beta (HBB), RefSeqGene
(LRG_1232) on chromosome 11; an A altered to T in Sickle cell disease is indicated in bold;
The bold-underlined T indicates a SNP_that is a C in some sickle cell patients. The underlined
ATG is the start codon.
(SEQ ID NO: 428)
ACATTTGCTTCTGACACAACTGTGTTCACTAGCAACCTCAAACAGACACCATGGTGCATCTG
ACTCCTGAGGAGAAGTCTGCCGTTACTGCCCTGTGGGGCAAGGTGAACGTGGATGAAGTTGG
TGGTGAGGCCCTGGGCAGGTTGGTATCAAGGTTACAAGACAGGTTTAAGGAGACCAATAGAA
ACTGGGCATGTGGAGACAGAGAAGACTCTTGGGTTTCTGATAGGCACTGACTCTCTCTGCCT
ATTGGTCTATTTTCCCACCCTTAGGCTGCTGGTGGTCTACCCTTGGACCCAGAGGTTCTTTG
AGTCCTTTGGGGATCTGTCCACTCCTGATGCTGTTATGGGCAACCCTAAGGTGAAGGCTCAT
GGCAAGAAAGTGCTCGGTGCCTTTAGTGATGGCCTGGCTCACCTGGACAACCTCAAGGGCAC
CTTTGCCACACTGAGTGAGCTGCACTGTGACAAGCTGCACGTGGATCCTGAGAACTTCAGGG
TGAGTCTATGGGACGCTTGATGTTTTCTTTCCCCTTCTTTTCTATGGTTAAGTTCATGTCAT
AGGAAGGGGATAAGTAACAGGGTACAGTTTAGAATGGGAAACAGACGAATGATTGCATCAGT
GTGGAAGTCTCAGGATCGTTTTAGTTTCTTTTATTTGCTGTTCATAACAATTGTTTTCTTTT
GTTTAATTCTTGCTTTCTTTTTTTTTCTTCTCCGCAATTTTTACTATTATACTTAATGCCTT
AACATTGTGTATAACAAAAGGAAATATCTCTGAGATACATTAAGTAACTTAAAAAAAAACTT
TACACAGTCTGCCTAGTACATTACTATTTGGAATATATGTGTGCTTATTTGCATATTCATAA
TCTCCCTACTTTATTTTCTTTTATTTTTAATTGATACATAATCATTATACATATTTATGGGT
TAAAGTGTAATGTTTTAATATGTGTACACATATTGACCAAATCAGGGTAATTTTGCATTTGT
AATTTTAAAAAATGCTTTCTTCTTTTAATATACTTTTTTGTTTATCTTATTTCTAATACTTT
CCCTAATCTCTTTCTTTCAGGGCAATAATGATACAATGTATCATGCCTCTTTGCACCATTCT
AAAGAATAACAGTGATAATTTCTGGGTTAAGGCAATAGCAATATCTCTGCATATAAATATTT
CTGCATATAAATTGTAACTGATGTAAGAGGTTTCATATTGCTAATAGCAGCTACAATCCAGC
TACCATTCTGCTTTTATTTTATGGTTGGGATAAGGCTGGATTATTCTGAGTCCAAGCTAGGC
CCTTTTGCTAATCATGTTCATACCTCTTATCTTCCTCCCACAGCTCCTGGGCAACGTGCTGG
TCTGTGTGCTGGCCCATCACTTTGGCAAAGAATTCACCCCACCAGTGCAGGCTGCCTATCAG
AAAGTGGTGGCTGGTGTGGCTAATGCCCTGGCCCACAAGTATCACTAAGCTCGCTTTCTTGC
TGTCCAATTTCTATTAAAGGTTCCTTTGTTCCCTAAGTCCAACTACTAAACTGGGGGATATT
ATGAAGGGCCTTGAGCATCTGGATTCTGCCTAATAAAAAACATTTATTTTCATTGCAA.

[0059] By “hemoglobin, gamma A (HBG1) polypeptide” is meant a polypeptide having at least about 85% amino acid sequence identity to Genbank Accession No. CAA23771.1, provided below, or a fragment thereof capable of forming a protein complex with alpha hemoglobin subunits.

(SEQ ID NO: 429)
MGHFTEEDKATITSLWGKVNVEDAGGETLGRLLVVYPWTQRFFDSFGNL
SSASAIMGNPKVKAHGKKVLTSLGDAIKHLDDLKGTFAQLSELHCDKLH
VDPENFKLLGNVLVTVLAIHFGKEFTPEVQASWQKMVTAVASALSSRYH.

[0060] By HBG1 polynucleotide” is meant a nucleic acid molecule that encodes an HBG1 polypeptide as well as the introns, exons, 3′ untranslated regions, 5′ untranslated regions, and regulatory sequences associated with its expression, or fragments thereof. In embodiments, a HBG1 polynucleotide is the genomic sequence, cDNA, mRNA, or gene associated with and/or required for HBG1 expression. An exemplary HBB polynucleotide sequence from Homo sapiens is provided on ENSEMBL at accession no. GRCh38:11:5248044:5259425:1, the reverse-complement of which is provided below (SEQ ID NO: 430). In the below sequence, exons encoding HBG1 are shown in bold and an exemplary HBG1 promoter region corresponds to a region 5′ of the first exon encoding HBG1 (e.g., the first 100, 200, 300, or 400 nucleotides 5′ of the first exon), or portions thereof.

(SEQ ID NO: 430)
CCTTCTCACTTGGGTAGGCTCTGTCAGAGGGAAAGTCTAGGCCTCAAGGCTGAGACTTTTGT
CCCATGAGGTGTTCCCTTGATGTAGCACAGTCCCCCTTTTCCTAGGCGTGGGGCTTCCTGAG
AGCCGAACTGTAGTGATTGTTATCTCTCTTCTGGATCTAGCCACCCATCAGGTCTACCAGAC
TCCAGGCTGGTACTGGGGTTTGTCTGCACAGAGTCTTGTGACGTGAACCATCTGTGGGTCTC
TCAGCCATAGATACAACCACCTGCTCCAATGGAGGTGGCAGAGGATGAAATGGACTCTGTGA
GGGTCCTTACTTTTGGTTGTTCAATGCACTATTTTTGTGCTGGTTGGCCTCCTGCCAGGAGG
TGGCACTTTCTAGAAAGCATCAGCAGAGGCAGTCAGGTGGTGGTGGCTGGGGGGGCTGGGGC
ACCCTAGAACTCCCAAGAATATATGCCCTTTGTCTTCAGCTACCAGGGTGAGTAAGGAAGGA
CCATCAGGTGGGGGCAGGACTAGTCGTGTCTGAGCTCAGAGTCTCCTTGGGCAGGTCTTTCT
GTGGCTACTGTGGGAGGATGGGGGTGTAGTTTCCAGGTCAATGGATTTATGTTCCTAGGACA
ATTATGGCTGCCTCTGCTGTGTCATGCAGGTCATCAGGAAAGTGGGGGAAAGCAAGCAGTCA
CGTGACTTGCCCAGCTCCCATGCAACTCAAAAGGTTGGTCTCACTTCCAGCGTGCACCCTCC
CCCGCAACAGCACCGAATCTGTTTCCATGCAGTCAGTGAGCAAGGCTGAGAACTTGCCCCAG
GCTACCAGCTGCGAAACCAAGTAGGGCTGTCCTACTTCCCTGCCAGTGGAGTCTGCACACCA
AATTCATGTCCCCCCACCAACCCCCCCACTGCCCAGCCCCTAGATCTGGCCAGGTGGAGATT
TTCTTTTTCCTGTCATCTTTTCCCAGTTCCTCTGGCAGCCCTCCCAAATGACCCCTGTGAGG
CAAGGCAGAAATGGCTTCCTAGGGGACCCAGAGAGCCCACAGGGCTTTTCCCGCTGCTTCCT
CTACCCCTGTATTTTGCTTGGCCCTCTAAATTGACTCAGCTCCAGGTAAGGTCAGAATCTTC
TCCTGTGGTCTAGATCTTCAGGTTCCCCAGTGAGGATGTGTGTTTGGGGGTAGACGGTCCCC
CTTTTCCACTTCCACAGTTTGGGCACTCACAATATTTGGGGTGTTTCCCGGGTCCTGCAGGA
GCAATCTGCTTCTTTCAGAGGGTGTGTGCGTTCTCTCAGCTTTCTTGATTTATTTCTGCAGG
TGGTTCTGCAAAAAAAATTCCTGATGGGAGACTTCACATGCTGCTCTGTGCATCCGAGTGGG
AGCTGCAATGTACTTCTGCTGCCTCCCATCTGCCATCACCCTCTAATTTGTCGGTAATATGC
ATTTTTAATCAATCTTTTTTTCTCTCTCTCTCTTTTTCTTCTCCCCCAAAACTATACTGCCC
TTTGATATCAAGGAATCAAGGACGTGATGTTGAGGGGTGGGCAGTGGATACACTCTTTACCC
CTTAGGGAGCTATATCTAGATTTAGATATTGCCAATTCAAGATAACTTAATTGAAAGCAAAT
TCATAATGAATACACACACACACACACACATCTGCATGACAAGATTTTTAATAGTTGAAAGA
ATAACTAATAATTGTCCACAGGCAATAAGGGCTTTTTAAGCAAAACAGTTGTGATAAACAGG
TCATTCTTAGAATAGTAATCCAGCCAATAGTACAGGTTGCTTAGAGATTATGTCATTACCAG
AGTTAAAATTCTATAATGGCTTCTCACTCCCTACCACTGAGGACAAGTTTATGTCCTTAGGT
TTATGCTTCCCTGAAACAATACCACCTGCTATTCTCCACTTTACATATCAACGGCACTGGTT
CTTTATCTAACTCTCTGGCACAGCAGGAGTTTGTTTTCTTCTGCTTCAGAGCTTTGAATTTA
CTATTTCAGCTTCTAAACTTTATTTGGCAATGCCTTCCCATGGCAGATTCCTTCTGTCATTT
TGCCTCTGTTCGAATACTTTCTCCTTAATTTCATTCTTAGTTAATAATATCTGAAATTATTT
TGTTGTTTAACTTAATTATTAATTTTATGTATGTTCTACCTAGATTATAATCTTCAGAGGAA
AGTTTTATTCTCTGACTTATTTAACTTAAATGCCCACTACTTTAAAAATTATGACATTTATT
TAACAGATATTTGCTGAACAAATGTTTGAAAATACATGGGAAAGAATGCTTGAAAACACTTG
AAATTGCTTGTGTAAAGAAACAGTTTTATCAGTTAGGATTTAATCAATGTCAGAAGCAATGA
TATAGGAAAAATCGAGGAATAAGACAGTTATGGATAAGGAGAAATCAACAAACTCTTAAAAG
ATATTGCCTCAAAAGCATAAGAGGAAATAAGGGTTTATACATGACTTTTAGAACACTGCCTT
GGTTTTTGGATAAATGGGGAAGTTGTTTGAAAACAGGAGGGATCCTAGATATTCCTTAGTCT
GAGGAGGAGCAATTAAGATTCACTTGTTTAGAGGCTGGGAGTGGTGGCTCACGCCTGTAATC
CCAGAATTTTGGGAGGCCAAGGCAGGCAGATCACCTGAGGTCAAGAGTTCAAGACCAACCTG
GCCAACATGGTGAAATCCCATCTCTACAAAAATACAAAAATTAGACAGGCATGATGGCAAGT
GCCTGTAATCCCAGCTACTTGGGAGGCTGAGGAAGGAGAATTGCTTGAACCTGGAAGGCAGG
AGTTGCAGTGAGCCGAGATCATACCACTGCACTCCAGCCTGGGTGACAGAACAAGACTCTGT
CTCAAAAAAAAAAAAGAGAGATTCAAAAGATTCACTTGTTTAGGCCTTAGCGGGCTTAGACA
CCAGTCTCTGACACATTCTTAAAGGTCAGGCTCTACAAATGGAACCCAACCAGACTCTCAGA
TATGGCCAAAGATCTATACACACCCATCTCACAGATCCCCTATCTTAAAGAGACCCTAATTT
GGGTTCACCTCAGTCTCTATAATCTGTACCAGCATACCAATAAAAATCTTTCTCACCCATCC
TTAGATTGAGAGAAGTCACTTATTATTATGTGAGTAACTGGAAGATACTGATAAGTTGACAA
ATCTTTTTCTTTCCTTTCTTATTCAACTTTTATTTTAACTTCCAAAGAACAAGTGCAATATG
TGCAGCTTTGTTGCGCAGGTCAACATGTATCTTTCTGGTCTTTTAGCCGCCTAACACTTTGA
GCAGATATAAGCCTTACACAGGATTATGAAGTCTGAAAGGATTCCACCAATATTATTATAAT
TCCTATCAACCTGATAGGTTAGGGGAAGGTAGAGCTCTCCTCCAATAAGCCAGATTTCCAGA
GTTTCTGACGTCATAATCTACCAAGGTCATGGATCGAGTTCAGAGAAAAAACAAAAGCAAAA
CCAAACCTACCAAAAAATAAAAATCCCAAAGAAAAAATAAAGAAAAAAACAGCATGAATACT
TCCTGCCATGTTAAGTGGCCAATATGTCAGAAACAGCACTGAGTTACAGATAAAGATGTCTA
AACTACAGTGACATCCCAGCTGTCACAGTGTGTGGACTATTAGTCAATAAAACAGTCCCTGC
CTCTTAAGAGTTGTTTTCCATGCAAATACATGTCTTATGTCTTAGAATAAGATTCCCTAAGA
AGTGAACCTAGCATTTATACAAGATAATTAATTCTAATCCATAGTATCTGGTAAAGAGCATT
CTACCATCATCTTTACCGAGCATAGAAGAGCTACACCAAAACCCTGGGTCATCAGCCAGCAC
ATACACTTATCCAGTGATAAATACACATCATCGGGTGCCTACATACATACCTGAATATAAAA
AAAATACTTTTGCTGAGATGAAACAGGCGTGATTTATTTCAAATAGGTACGGATAAGTAGAT
ATTGAAGTAAGGATTCAGTCTTATATTATATTACATAACATTAATCTATTCCTGCACTGAAA
CTGTTGCTTTATAGGATTTTTCACTACACTAATGAGAACTTAAGAGATAATGGCCTAAAACC
ACAGAGAGTATATTCAAAGATAAGTATAGCACTTCTTATTTGGAAACCAATGCTTACTAAAT
GAGACTAAGACGTGTCCCATCAAAAATCCTGGACCTATGCCTAAAACACATTTCACAATCCC
TGAACTTTTCAAAAATTGGTACATGCTTTAACTTTAAACTACAGGCCTCACTGGAGCTACAG
ACAAGAAGGTGAAAAACGGCTGACAAAAGAAGTCCTGGTATCTTCTATGGTGGGAGAAGAAA
ACTAGCTAAAGGGAAGAATAAATTAGAGAAAAATTGGAATGACTGAATCGGAACAAGGCAAA
GGCTATAAAAAAAATTAAGCAGCAGTATCCTCTTGGGGGCCCCTTCCCCACACTATCTCAAT
GCAAATATCTGTCTGAAACGGTCCCTGGCTAAACTCCACCCATGGGTTGGCCAGCCTTGCCT
TGACCAATAGCCTTGACAAGGCAAACTTGACCAATAGTCTTAGAGTATCCAGTGAGGCCAGG
GGCCGGCGGCTGGCTAGGGATGAAGAATAAAAGGAAGCACCCTTCAGCAGTTCCACACACTC
GCTTCTGGAACGTCTGAGGTTATCAATAAGCTCCTAGTCCAGACGCCATGGGTCATTTCACA
GAGGAGGACAAGGCTACTATCACAAGCCTGTGGGGCAAGGTGAATGTGGAAGATGCTGGAGG
AGAAACCCTGGGAAGGTAGGCTCTGGTGACCAGGACAAGGGAGGGAAGGAAGGACCCTGTGC
CTGGCAAAAGTCCAGGTCGCTTCTCAGGATTTGTGGCACCTTCTGACTGTCAAACTGTTCTT
GTCAATCTCACAGGCTCCTGGTTGTCTACCCATGGACCCAGAGGTTCTTTGACAGCTTTGGC
AACCTGTCCTCTGCCTCTGCCATCATGGGCAACCCCAAAGTCAAGGCACATGGCAAGAAGGT
GCTGACTTCCTTGGGAGATGCCATAAAGCACCTGGATGATCTCAAGGGCACCTTTGCCCAGC
TGAGTGAACTGCACTGTGACAAGCTGCATGTGGATCCTGAGAACTTCAAGGTGAGTCCAGGA
GATGTTTCAGCACTGTTGCCTTTAGTCTCGAGGCAACTTAGACAACTGAGTATTGATCTGAG
CACAGCAGGGTGTGAGCTGTTTGAAGATACTGGGGTTGGGAGTGAAGAAACTGCAGAGGACT
AACTGGGCTGAGACCCAGTGGCAATGTTTTAGGGCCTAAGGAGTGCCTCTGAAAATCTAGAT
GGACAACTTTGACTTTGAGAAAAGAGAGGTGGAAATGAGGAAAATGACTTTTCTTTATTAGA
TTTCGGTAGAAAGAACTTTCACCTTTCCCCTATTTTTGTTATTCGTTTTAAAACATCTATCT
GGAGGCAGGACAAGTATGGTCATTAAAAAGATGCAGGCAGAAGGCATATATTGGCTCAGTCA
AAGTGGGGAACTTTGGTGGCCAAACATACATTGCTAAGGCTATTCCTATATCAGCTGGACAC
ATATAAAATGCTGCTAATGCTTCATTACAAACTTATATCCTTTAATTCCAGATGGGGGCAAA
GTATGTCCAGGGGTGAGGAACAATTGAAACATTTGGGCTGGAGTAGATTTTGAAAGTCAGCT
CTGTGTGTGTGTGTGTGTGTGTGCGCGCGTGTGTTTGTGTGTGTGTGAGAGCGTGTGTTTCT
TTTAACGTTTTCAGCCTACAGCATACAGGGTTCATGGTGGCAAGAAGATAACAAGATTTAAA
TTATGGCCAGTGACTAGTGCTGCAAGAAGAACAACTACCTGCATTTAATGGGAAAGCAAAAT
CTCAGGCTTTGAGGGAAGTTAACATAGGCTTGATTCTGGGTGGAAGCTTGGTGTGTAGTTAT
CTGGAGGCCAGGCTGGAGCTCTCAGCTCACTATGGGTTCATCTTTATTGTCTCCTTTCATCT
CAACAGCTCCTGGGAAATGTGCTGGTGACCGTTTTGGCAATCCATTTCGGCAAAGAATTCAC
CCCTGAGGTGCAGGCTTCCTGGCAGAAGATGGTGACTGGAGTGGCCAGTGCCCTGTCCTCCA
GATACCACTGAGCTCACTGCCCATGATGCAGAGCTTTCAAGGATAGGCTTTATTCTGCAAGC
AATCAAATAATAAATCTATTCTGCTAAGAGATCACACATGGTTGTCTTCAGTTCTTTTTTTA
TGTCTTTTTAAATATATGAGCCACAAAGGGTTTTATGTTGAGGGATGTGTTTATGTGTATTT
ATACATGGCTATGTGTGTTTGTGTCATGTGCACACTCCACACTTTTTTGTTTACGTTAGATG
TGGGTTTTGATGAGCAAATAAAAGAACTAGGCAATAAAGAAACTTGTACATGGGAGTTCTGC
AAGTGGGAGTAAAAGGTGCAGGAGAAATCTGGTTGGAAGAAAGACCTCTATAGGACAGGACT
CCTCAGAAACAGATGTTTTGGAAGAGATGGGGAAAGGTTCAGTGAAGGGGGCTGAACCCCCT
TCCCTGGATTGCAGCACAGCAGCGAGGAAGGGGCTCAACGAAGAAAAAGTGTTCCAAGCTTT
AGGAAGTCAAGGTTTAGGCAGGGATAGCCATTCTATTTTATTAGGGGCAATACTATTTCCAA
CGGCATCTGGCTTTTCTCAGCCCTTGTGAGGCTCTACAGGGAGGTTGAGGTGTTAGAGATCA
GAGCAGGAAACAGGTTTTTCTTTCCACGGTAACTACAATGAAGTGATCCTTACTTTACTAAG
GAACTTTTCATTTTAAGTGTTGACGCATGCCTAAAGAGGTGAAATTAATCCCATACCCTTAA
GTCTACAGACTGGTCACAGCATTTCAAGGAGGAGACCTCATTGTAAGCTTCTAGGGAGGTGG
GGACTTAGGTGAAGGAAATGAGCCAGCAGAAGCTCACAAGTCAGCATCAGCGTGTCATGTCT
CAGCAGCAGAACAGCACGGTCAGATGAAAATATAGTGTGAAGAATTTGTATAACATTAATTG
AGAAGGCAGATTCACTGGAGTTCTTATATAATTGAAAGTTAATGCACGTTAATAAGCAAGAG
TTTAGTTTAATGTGATGGTGTTATGAACTTAACGCTTGTGTCTCCAGAAAATTCACATGCTG
AATCCCCAACTCCCAATTGGCTCCATTTGTGGGGGAGGCTTTGGAAAAGTAATCAGGTTTAG
AGGAGCTCATGAGAGCAGATCCCCATCATAGAATTATTTTCCTCATCAGAAGCAGAGAGATT
AGCCATTTCTCTTCCTTCTGGTGAGGACACAGTGGGAAGTCAGCCACCTGCAACCCAGGAAG
AGAGCCCTGACCAGGAACCAGCAGAAAAGTGAGAAAAAATCCTGTTGTTGAAGTCACCCAGT
CTATGCTATTTTGTTATAGCACCTTGCACTAAGTAAGGCAGATGAAGAAAGAGAAAAAAATA
AGCTTCGGTGTTCAGTGGATTAGAAACCATGTTTATCTCAGGTTTACAAATCTCCACTTGTC
CTCTGTGTTTCAGAATAAAATACCAACTCTACTACTCTCATCTGTAAGATGCAAATAGTAAG
CCTGAGCCCTTCTGTCTAACTTTGAATTCTATTTTTTCTTCAACGTACTTTAGGCTTGTAAT
GTGTTTATATACAGTGAAATGTCAAGTTCTTTCTTTATATTTCTTTCTTTCTTTTTTTTCCT
CAGCCTCAGAGTTTTCCACATGCCCTTCCTACTTTCAGGAACTTCTTTCTCCAAACGTCTTC
TGCCTGGCTCCATCAAATCATAAAGGACCCACTTCAAATGCCATCACTCACTACCATTTCAC
AATTCGCACTTTCTTTCTTTGTCCTTTTTTTTTTTAGTAAAACAAGTTTATAAAAAATTGAA
GGAATAAATGAATGGCTACTTCATAGGCAGAGTAGACGCAAGGGCTACTGGTTGCCGATTTT
TATTGTTATTTTTCAATAGTATGCTAAACAAGGGGTAGATTATTTATGCTGCCCATTTTTAG
ACCATAAAAGATAACTTCCTGATGTTGCCATGGCATTTTTTTCCTTTTAATTTTATTTCATT
TCATTTTAATTTCGAAGGTACATGTGCAGGATGTGCAGGCTTGTTACATGGGTAAATGTGTG
TCTTTCTGGCCTTTTAGCCATCTGTATCAATGAGCAGATATAAGCTTTACACAGGATCATGA
AGGATGAAAGAATTTCACCAATATTATAATAATTTCAATCAACCTGATAGCTTAGGGGATAA
ACTAATTTGAAGATACAGCTTGCCTCCGATAAGCCAGAATTCCAGAGCTTCTGGCATTATAA
TCTAGCAAGGTTAGAGATCATGGATCACTTTCAGAGAAAAACAAAAACAAACTAACCAAAAG
CAAAACAGAACCAAAAAACCACCATAAATACTTCCTACCCTGTTAATGGTCCAATATGTCAG
AAACAGCACTGTGTTAGAAATAAAGCTGTCTAAAGTACACTAATATTCGAGTTATAATAGTG
TGTGGACTATTAGTCAATAAAAACAACCCTTGCCTCTTTAGAGTTGTTTTCCATGTACACGC
ACATCTTATGTCTTAGAGTAAGATTCCCTGAGAAGTGAACCTAGCATTTATACAAGATAATT
AATTCTAATCCACAGTACCTGCCAAAGAACATTCTACCATCATCTTTACTGAGCATAGAAGA
GCTACGCCAAAACCCTGGGTCATCAGCCAGCACACACACTTATCCAGTGGTAAATACACATC
ATCTGGTGTATACATACATACCTGAATATGGAATCAAATATTTTTCTAAGATGAAACAGTCA
TGATTTATTTCAAATAGGTACGGATAAGTAGATATTGAGGTAAGCATTAGGTCTTATATTAT
GTAACACTAATCTATTACTGCGCTGAAACTGTGGCTTTATAGAAATTGTTTTCACTGCACTA
TTGAGAAATTAAGAGATAATGGCAAAAGTCACAAAGAGTATATTCAAAAAGAAGTATAGCAC
TTTTTCCTTAGAAACCACTGCTAACTGAAAGAGACTAAGATTTGTCCCGTCAAAAATCCTGG
ACCTATGCCTAAAACACATTTCACAATCCCTGAACTTTTCAAAAATTGGTACATGCTTTAGC
TTTAAACTACAGGCCTCACTGGAGCTAGAGACAAGAAGGTAAAAAACGGCTGACAAAAGAAG
TCCTGGTATCCTCTATGATGGGAGAAGGAAACTAGCTAAAGGGAAGAATAAATTAGAGAAAA
ACTGGAATGACTGAATCGGAACAAGGCAAAGGCTATAAAAAAAATTAGCAGTATCCTCTTGG
GGGCCCCTTCCCCACACTATCTCAATGCAAATATCTGTCTGAAACGGTCCCTGGCTAAACTC
CACCCATGGGTTGGCCAGCCTTGCCTTGACCAATAGCCTTGACAAGGCAAACTTGACCAATA
GTCTTAGAGTATCCAGTGAGGCCAGGGGCCGGCGGCTGGCTAGGGATGAAGAATAAAAGGAA
GCACCCTTCAGCAGTTCCACACACTCGCTTCTGGAACGTCTGAGGTTATCAATAAGCTCCTA
GTCCAGACGCCATGGGTCATTTCACAGAGGAGGACAAGGCTACTATCACAAGCCTGTGGGGC
AAGGTGAATGTGGAAGATGCTGGAGGAGAAACCCTGGGAAGGTAGGCTCTGGTGACCAGGAC
AAGGGAGGGAAGGAAGGACCCTGTGCCTGGCAAAAGTCCAGGTCGCTTCTCAGGATTTGTGG
CACCTTCTGACTGTCAAACTGTTCTTGTCAATCTCACAGGCTCCTGGTTGTCTACCCATGGA
CCCAGAGGTTCTTTGACAGCTTTGGCAACCTGTCCTCTGCCTCTGCCATCATGGGCAACCCC
AAAGTCAAGGCACATGGCAAGAAGGTGCTGACTTCCTTGGGAGATGCCACAAAGCACCTGGA
TGATCTCAAGGGCACCTTTGCCCAGCTGAGTGAACTGCACTGTGACAAGCTGCATGTGGATC
CTGAGAACTTCAAGGTGAGTCCAGGAGATGTTTCAGCCCTGTTGCCTTTAGTCTCGAGGCAA
CTTAGACAACGGAGTATTGATCTGAGCACAGCAGGGTGTGAGCTGTTTGAAGATACTGGGGT
TGGGGGTGAAGAAACTGCAGAGGACTAACTGGGCTGAGACCCAGTGGTAATGTTTTAGGGCC
TAAGGAGTGCCTCTAAAAATCTAGATGGACAATTTTGACTTTGAGAAAAGAGAGGTGGAAAT
GAGGAAAATGACTTTTCTTTATTAGATTCCAGTAGAAAGAACTTTCATCTTTCCCTCATTTT
TGTTGTTTTAAAACATCTATCTGGAGGCAGGACAAGTATGGTCGTTAAAAAGATGCAGGCAG
AAGGCATATATTGGCTCAGTCAAAGTGGGGAACTTTGGTGGCCAAACATACATTGCTAAGGC
TATTCCTATATCAGCTGGACACATATAAAATGCTGCTAATGCTTCATTACAAACTTATATCC
TTTAATTCCAGATGGGGGCAAAGTATGTCCAGGGGTGAGGAACAATTGAAACATTTGGGCTG
GAGTAGATTTTGAAAGTCAGCTCTGTGTGTGTGTGTGTGTGTGCGCGCGCGCGTGTGTGTGT
GTGTGTCAGCGTGTGTTTCTTTTAACGTCTTCAGCCTACAACATACAGGGTTCATGGTGGCA
AGAAGATAGCAAGATTTAAATTATGGCCAGTGACTAGTGCTTGAAGGGGAACAACTACCTGC
ATTTAATGGGAAGGCAAAATCTCAGGCTTTGAGGGAAGTTAACATAGGCTTGATTCTGGGTG
GAAGCTTGGTGTGTAGTTATCTGGAGGCCAGGCTGGAGCTCTCAGCTCACTATGGGTTCATC
TTTATTGTCTCCTTTCATCTCAACAGCTCCTGGGAAATGTGCTGGTGACCGTTTTGGCAATC
CATTTCGGCAAAGAATTCACCCCTGAGGTGCAGGCTTCCTGGCAGAAGATGGTGACTGCAGT
GGCCAGTGCCCTGTCCTCCAGATACCACTGAGCTCACTGCCCATGATTCAGAGCTTTCAAGG
ATAGGCTTTATTCTGCAAGCAATACAAATAATAAATCTATTCTGCTGAGAGATCACACATGA
TTTTCTTCAGCTCTTTTTTTTACATCTTTTTAAATATATGAGCCACAAAGGGTTTATATTGA
GGGAAGTGTGTATGTGTATTTCTGCATGCCTGTTTGTGTTTGTGGTGTGTGCATGCTCCTCA
TTTATTTTTATATGAGATGTGCATTTTGATGAGCAAATAAAAGCAGTAAAGACACTTGTACA
CGGGAGTTCTGCAAGTGGGAGTAAATGGTGTAGGAG.

[0061] By “hemoglobin, gamma G (HBG2) polypeptide” is meant a polypeptide having at least about 85% amino acid sequence identity to Genbank Accession No. CAA23773.1, provided below, or a fragment thereof capable of forming a protein complex with alpha hemoglobin subunits.

(SEQ ID NO: 431)
MGHFTEEDKATITSLWGKVNVEDAGGETLGRLLVVYPWTQRFFDSFGNL
SSASAIMGNPKVKAHGKKVLTSLGDAIKHLDDLKGTFAQLSELHCDKLH
VDPENFKLLGNVLVTVLAIHFGKEFTPEVQASWQKMVTGVASALSSRYH.

[0062] By HBG2 polynucleotide” is meant a nucleic acid molecule that encodes an HBG2 polypeptide as well as the introns, exons, 3′ untranslated regions, 5′ untranslated regions, and regulatory sequences associated with its expression, or fragments thereof. In embodiments, a HBG2 polynucleotide is the genomic sequence, cDNA, mRNA, or gene associated with and/or required for HBG2 expression. An exemplary HBB polynucleotide sequence from Homo sapiens is provided on ENSEMBL at accession no. GRCh38:11:5248044:5259425:1, the reverse-complement of which is provided above (SEQ ID NO: 430). In the above sequence (SEQ ID NO: 430), exons encoding HBG2 are shown in bold-underlined text and an exemplary HBG2 promoter region corresponds to a region 5′ of the first exon encoding HBG2 (e.g., the first 100, 200, 300, or 400 nucleotides 5′ of the first exon), or portions thereof.

[0063] The term “Cas9” or “Cas9 domain” refers to an RNA guided nuclease comprising a Cas9 protein, or a fragment thereof (e.g., a protein comprising an active, inactive, or partially active DNA cleavage domain of Cas9, and/or the gRNA binding domain of Cas9). A Cas9 nuclease is also referred to sometimes as a casnl nuclease or a CRISPR (clustered regularly interspaced short palindromic repeat) associated nuclease.

[0064] By “chimeric antigen receptor T cell” or “CAR-T cell” is meant a T cell expressing a CAR that has antigen specificity determined by the antibody-derived targeting domain of the CAR. As used herein, “CAR-T cells” include regulatory T (TREG) cells. As used herein, “CAR-T cells” include cells engineered to express a CAR or a T cell receptor (TCR). Methods of making CARs are publicly available (see, e.g., Park et al., Trends Biotechnol., 29:550-557, 2011; Grupp et al., N Engl J Med., 368:1509-1518, 2013; Han et al., J. Hematol Oncol. 6:47, 2013; Haso et al., (2013) Blood, 121, 1165-1174; Mohseni, et al., (2020) Front. Immunol., 11, art. 1608, doi: 10.3389/fimmu.2020.01608; Eggenhuizen, et al. Int. J. Mol. Sci. (2020), 21:7015, doi: 10.3390/ijms21197015; PCT Pubs. WO2012/079000, WO2013/059593; and U.S. Pub. 2012/0213783, the disclosure of each of which is incorporated herein by reference herein in its entirety for all purposes).

[0065] The term “conservative amino acid substitution” or “conservative mutation” refers to the replacement of one amino acid by another amino acid with a common property. A functional way to define common properties between individual amino acids is to analyze the normalized frequencies of amino acid changes between corresponding proteins of homologous organisms (Schulz, G. E. and Schirmer, R. H., Principles of Protein Structure, Springer-Verlag, New York (1979)). According to such analyses, groups of amino acids can be defined where amino acids within a group exchange preferentially with each other, and therefore resemble each other most in their impact on the overall protein structure (Schulz, G. E. and Schirmer, R. H., supra). Non-limiting examples of conservative mutations include amino acid substitutions of amino acids, for example, lysine for arginine and vice versa such that a positive charge can be maintained; glutamic acid for aspartic acid and vice versa such that a negative charge can be maintained; serine for threonine such that a free —OH can be maintained; and glutamine for asparagine such that a free —NH₂ can be maintained.

[0066] The term “coding sequence” or “protein coding sequence” as used interchangeably herein refers to a segment of a polynucleotide that codes for a protein. Coding sequences can also be referred to as open reading frames. The region or sequence is bounded nearer the 5′ end by a start codon and nearer the 3′ end with a stop codon. Stop codons useful with the base editors described herein include the following: TAG, TAA, and TGA.

[0067] As used herein, the terms “condition” and “conditioning” refer to processes by which a patient is prepared for receipt of a transplant containing hematopoietic stem cells. Such procedures promote the engraftment of a hematopoietic stem cell transplant (for instance, as inferred from a sustained increase in the quantity of viable hematopoietic stem cells within a blood sample isolated from a patient following a conditioning procedure and subsequent hematopoietic stem cell transplantation). According to the methods described herein, a patient may be conditioned for hematopoietic stem cell transplant therapy by administration to the patient of an antibody or antigen-binding fragment thereof capable of binding an antigen expressed by hematopoietic stem cells, such as CD117, CXCR4, CD135, CD90, CD45, and/or CD34. Such antibodies are expected to act via complement-mediated cytotoxicity and antibody-dependent cell-mediated cytotoxicity. As described herein, the transplanted cells have been edited so that the antibody no longer binds the antigen (e.g., CD117, CXCR4, CD135, CD90, CD45, and/or CD34). Administration of an antibody, antigen-binding fragment thereof, drug-antibody conjugate, or chimeric antigen receptor expressing T-cell (CAR-T) capable of binding one or more antigens (e.g., CD117, CXCR4, CD135, CD90, CD45, CD34) to a patient in need of hematopoietic stem cell transplant therapy can promote the engraftment of a hematopoietic stem cell graft, for example, by selectively depleting endogenous hematopoietic stem cells, thereby creating a vacancy filled by an exogenous hematopoietic stem cell transplant.

[0068] By “complex” is meant a combination of two or more molecules whose interaction relies on inter-molecular forces. Non-limiting examples of inter-molecular forces include covalent and non-covalent interactions. Non-limiting examples of non-covalent interactions include hydrogen bonding, ionic bonding, halogen bonding, hydrophobic bonding, van der Waals interactions (e.g., dipole-dipole interactions, dipole-induced dipole interactions, and London dispersion forces), and π-effects. In an embodiment, a complex comprises polypeptides, polynucleotides, or a combination of one or more polypeptides and one or more polynucleotides. In one embodiment, a complex comprises one or more polypeptides that associate to form a base editor (e.g., base editor comprising a nucleic acid programmable DNA binding protein, such as Cas9, and a deaminase) and a polynucleotide (e.g., a guide RNA). In an embodiment, the complex is held together by hydrogen bonds. It should be appreciated that one or more components of a base editor (e.g., a deaminase, or a nucleic acid programmable DNA binding protein) may associate covalently or non-covalently. As one example, a base editor may include a deaminase covalently linked to a nucleic acid programmable DNA binding protein (e.g., by a peptide bond). Alternatively, a base editor may include a deaminase and a nucleic acid programmable DNA binding protein that associate noncovalently (e.g., where one or more components of the base editor are supplied in trans and associate directly or via another molecule such as a protein or nucleic acid). In an embodiment, one or more components of the complex are held together by hydrogen bonds.

[0069] By “cytosine” or “4-Aminopyrimidin-2(1H)-one” is meant a purine nucleobase with the molecular formula C₄H₅N₃O, having the structure

[chemical structure]

and corresponding to CAS No. 71-30-7.

[0070] By “cytidine” is meant a cytosine molecule attached to a ribose sugar via a glycosidic bond, having the structure

[chemical structure]

and corresponding to CAS No. 65-46-3. Its molecular formula is C₉H₁₃N₃O₅.

[0071] The term “deaminase” or “deaminase domain,” as used herein, refers to a protein or fragment thereof that catalyzes a deamination reaction.

[0072] “Detect” refers to identifying the presence, absence or amount of the analyte to be detected. In one embodiment, a sequence alteration in a polynucleotide or polypeptide is detected. In another embodiment, the presence of indels is detected.

[0073] By “detectable label” is meant a composition that when linked to a molecule of interest renders the latter detectable, via spectroscopic, photochemical, biochemical, immunochemical, or chemical means. For example, useful labels include radioactive isotopes, magnetic beads, metallic beads, colloidal particles, fluorescent dyes, electron-dense reagents, enzymes (for example, as commonly used in an enzyme linked immunosorbent assay (ELISA)), biotin, digoxigenin, or haptens.

[0074] By “disease” is meant any condition or disorder that damages or interferes with the normal function of a cell, tissue, or organ. In an embodiment, the disease is sickle cell disease or ß-thalassemia.

[0075] By “effective amount” is meant the amount of an agent (e.g., a base editor, cell) as described herein, that is required to ameliorate the symptoms of a disease relative to an untreated patient or an individual without disease, i.e., a healthy individual, or is the amount of the agent sufficient to elicit a desired biological response. The effective amount of active compound(s) used to practice embodiments of the present disclosure for therapeutic treatment of a disease varies depending upon the manner of administration, the age, body weight, and general health of the subject. Ultimately, the attending physician or veterinarian will decide the appropriate amount and dosage regimen. Such amount is referred to as an “effective” amount. In one embodiment, an effective amount is the amount of a base editor of the disclosure sufficient to introduce an alteration in a gene of interest in a cell (e.g., a cell in vitro or in vivo). In one embodiment, an effective amount is the amount of a base editor required to achieve a therapeutic effect. Such therapeutic effect need not be sufficient to alter a pathogenic gene in all cells of a subject, tissue or organ, but only to alter the pathogenic gene in about 1%, 5%, 10%, 25%, 50%, 75% or more of the cells present in a subject, tissue or organ. In one embodiment, an effective amount is sufficient to ameliorate one or more symptoms of a disease.

[0076] By “fragment” is meant a portion of a polypeptide or nucleic acid molecule. This portion contains, at least about 10%, 20%, 30%, 40%, 50%, 60%, 70%, 80%, or 90% of the entire length of the reference nucleic acid molecule or polypeptide. A fragment may contain 10, 20, 30, 40, 50, 60, 70, 80, 90, or 100, 200, 300, 400, 500, 600, 700, 800, 900, or 1000 nucleotides or amino acids. In some embodiments, the fragment is a functional fragment.

[0077] By “guide polynucleotide” is meant a polynucleotide or polynucleotide complex which is specific for a target sequence and can form a complex with a polynucleotide programmable nucleotide binding domain protein (e.g., Cas9 or Cpf1). In an embodiment, the guide polynucleotide is a guide RNA (gRNA). gRNAs can exist as a complex of two or more RNAs, or as a single RNA molecule.

[0078] As used herein, the term “hematopoietic stem cells” (“HSCs”) refers to immature blood cells having the capacity to self-renew and to differentiate into mature blood cells containing diverse lineages including but not limited to granulocytes (e.g., promyelocytes, neutrophils, eosinophils, basophils), erythrocytes (e.g., reticulocytes, erythrocytes), thrombocytes (e.g., megakaryoblasts, platelet producing megakaryocytes, platelets), monocytes (e.g., monocytes, macrophages), dendritic cells, microglia, osteoclasts, and lymphocytes (e.g., NK cells, B-cells and T-cells). Such cells may include CD34+ cells. CD34+ cells are immature cells that express the CD34 cell surface marker. In humans, CD34+ cells are believed to include a subpopulation of cells with the stem cell properties defined above, whereas in mice, HSCs are CD34−. In addition, HSCs also refer to long term repopulating HSCs (LT-HSC) and short term repopulating HSCs (ST-HSC). LT-HSCs and ST-HSCs are differentiated, based on functional potential and on cell surface marker expression. For example, human HSCs are CD34+, CD38−, CD45RA−, CD90+, CD49F+, and lin-(negative for mature lineage markers including CD2, CD3, CD4, CD7, CD8, CD10, CD11B, CD19, CD20, CD56, CD235A). In mice, bone marrow LT-HSCs are CD34−, SCA-1+, C-kit+, CD135−, Slamfl/CD150+, CD48−, and lin-(negative for mature lineage markers including Ter119, CD11b, Gr1, CD3, CD4, CD8, B220, IL7ra), whereas ST-HSCs are CD34+, SCA-1+, C-kit+, CD135−, Slamfl/CD150+, and lin-(negative for mature lineage markers including Ter1 19, CD11b, Gr1, CD3, CD4, CD8, B220, IL7ra). In addition, ST-HSCs are less quiescent and more proliferative than LT-HSCs under homeostatic conditions. However, LT-HSC have greater self-renewal potential (i.e., they survive throughout adulthood, and can be serially transplanted through successive recipients), whereas ST-HSCs have limited self-renewal (i.e., they survive for only a limited period of time, and do not possess serial transplantation potential). Any of these HSCs can be used in the methods described herein. ST-HSCs are particularly useful because they are highly proliferative and thus, can more quickly give rise to differentiated progeny.

[0079] As used herein, the term “hematopoietic stem cell functional potential” refers to the functional properties of hematopoietic stem cells which include 1) multi-potency (which refers to the ability to differentiate into multiple different blood lineages including, but not limited to, granulocytes (e.g., promyelocytes, neutrophils, eosinophils, basophils), erythrocytes (e.g., reticulocytes, erythrocytes), thrombocytes (e.g., megakaryoblasts, platelet producing megakaryocytes, platelets), monocytes (e.g., monocytes, macrophages), dendritic cells, microglia, osteoclasts, and lymphocytes (e.g., NK cells, B-cells and T-cells), 2) self-renewal (which refers to the ability of hematopoietic stem cells to give rise to daughter cells that have equivalent potential as the mother cell, and further that this ability can repeatedly occur throughout the lifetime of an individual without exhaustion), and 3) the ability of hematopoietic stem cells or progeny thereof to be reintroduced into a transplant recipient whereupon they home to the hematopoietic stem cell niche and re-establish productive and sustained hematopoiesis.”

[0080] By “heterologous,” or “exogenous” is meant a polynucleotide or polypeptide that 1) has been experimentally incorporated to a polynucleotide or polypeptide sequence to which the polynucleotide or polypeptide is not normally found in nature; or 2) has been experimentally placed into a cell that does not normally comprise the polynucleotide or polypeptide. In some embodiments, “heterologous” means that a polynucleotide or polypeptide has been experimentally placed into a non-native context. In some embodiments, a heterologous polynucleotide or polypeptide is derived from a first species or host organism and is incorporated into a polynucleotide or polypeptide derived from a second species or host organism. In some embodiments, the first species or host organism is different from the second species or host organism. In some embodiments the heterologous polynucleotide is DNA. In some embodiments the heterologous polynucleotide is RNA.

[0081] “Hybridization” means hydrogen bonding, which may be Watson-Crick, Hoogsteen or reversed Hoogsteen hydrogen bonding, between complementary nucleobases. For example, adenine and thymine are complementary nucleobases that pair through the formation of hydrogen bonds.

[0082] By “increases” is meant a positive alteration of at least 10%, 25%, 50%, 75%, or 100%, or about 1.5 fold, about 2 fold, about 3-fold, about 4-fold, about 5-fold, about 6-fold, about 7-fold, about 8-fold, about 9-fold, about 10-fold, about 15-fold, about 20-fold, about 25-fold, about 30-fold, about 35-fold, about 40-fold, about 45-fold, about 50-fold, or about 100-fold.

[0083] The terms “inhibitor of base repair”, “base repair inhibitor”, “IBR” or their grammatical equivalents refer to a protein that is capable in inhibiting the activity of a nucleic acid repair enzyme, for example a base excision repair enzyme.

[0084] An “intein” is a fragment of a protein that is able to excise itself and join the remaining fragments (the exteins) with a peptide bond in a process known as protein splicing.

[0085] The terms “isolated,” “purified,” or “biologically pure” refer to material that is free to varying degrees from components which normally accompany it as found in its native state. “Isolate” denotes a degree of separation from original source or surroundings. “Purify” denotes a degree of separation that is higher than isolation. A “purified” or “biologically pure” protein is sufficiently free of other materials such that any impurities do not materially affect the biological properties of the protein or cause other adverse consequences. That is, a nucleic acid or peptide of this disclosure is purified if it is substantially free of cellular material, viral material, or culture medium when produced by recombinant DNA techniques, or chemical precursors or other chemicals when chemically synthesized. Purity and homogeneity are typically determined using analytical chemistry techniques, for example, polyacrylamide gel electrophoresis or high performance liquid chromatography. The term “purified” can denote that a nucleic acid or protein gives rise to essentially one band in an electrophoretic gel. For a protein that can be subjected to modifications, for example, phosphorylation or glycosylation, different modifications may give rise to different isolated proteins, which can be separately purified.

[0086] By “isolated polynucleotide” is meant a nucleic acid molecule that is free of the genes which, in the naturally-occurring genome of the organism from which the nucleic acid molecule of the disclosure is derived, flank the gene. The term therefore includes, for example, a recombinant DNA that is incorporated into a vector; into an autonomously replicating plasmid or virus; or into the genomic DNA of a prokaryote or eukaryote; or that exists as a separate molecule (for example, a cDNA or a genomic or cDNA fragment produced by PCR or restriction endonuclease digestion) independent of other sequences. In addition, the term includes an RNA molecule that is transcribed from a DNA molecule, as well as a recombinant DNA that is part of a hybrid gene encoding additional polypeptide sequence.

[0087] By an “isolated polypeptide” is meant a polypeptide of the disclosure that has been separated from components that naturally accompany it. Typically, the polypeptide is isolated when it is at least 60%, by weight, free from the proteins and naturally-occurring organic molecules with which it is naturally associated. In embodiments, the preparation is at least 75%, at least 90%, or at least 99%, by weight, a polypeptide of the disclosure. An isolated polypeptide of the disclosure may be obtained, for example, by extraction from a natural source, by expression of a recombinant nucleic acid encoding such a polypeptide; or by chemically synthesizing the protein. Purity can be measured by any appropriate method, for example, column chromatography, polyacrylamide gel electrophoresis, or by HPLC analysis.

[0088] The term “linker”, as used herein, refers to a molecule that links two moieties. In one embodiment, the term “linker” refers to a covalent linker (e.g., covalent bond) or a non-covalent linker.

[0089] “Makassar” or “Hb G-Makassar” refers to a human β-hemoglobin variant, the human Hemoglobin (Hb) of G-Makassar variant or mutation (HB Makassar variant), which is an asymptomatic, naturally-occurring variant (E6A) hemoglobin. Hb G-Makassar was first identified in Indonesia. (Mohamad, A. S. et al., 2018, Hematol. Rep., 10(3):7210 (doi:10.4081/hr.2018.7210). The Hb G-Makassar mobility is slower when subjected to electrophoresis. The Makassar β-hemoglobin variant has its anatomical abnormality at the 0-6 or A3 location where the glutamyl residue typically is replaced by an alanyl residue. The substitution of single amino acid in the gene encoding the β-globin subunit 0-6 glutamyl to valine will result as sickle cell disease. Routine procedures, such as isoelectric focusing, hemoglobin electrophoresis separation by cation-exchange High Performance Liquid Chromatography (HPLC) and cellulose acetate electrophoresis, have been unable to separate the Hb G-Makassar and HbS globin forms, as they were found to have identical properties when analyzed by these methods. Consequently, Hb G-Makassar and HbS have been incorrectly identified and mistaken for each other by those skilled in the art, thus leading to misdiagnosis of Sickle Cell Disease (SCD). In one embodiment, the valine at amino acid position 6, which causes sickle cell disease, is replaced with an alanine, to thereby generate an Hb variant (Hb Makassar) that does not generate a sickle cell phenotype. In some embodiments, a Val→Ala (GTG→GCG) replacement (i.e., the Hb Makassar variant) can be generated using an A•T to G•C base editor (ABE).

[0090] By “marker” is meant any protein or polynucleotide having an alteration in expression, level, structure, or activity that is associated with a disease or disorder. In some embodiments, a marker is single-nucleotide polymorphism associated with a disease or disorder.

[0091] The term “mutation,” as used herein, refers to a substitution of a residue within a sequence, e.g., a nucleic acid or amino acid sequence, with another residue, or a deletion or insertion of one or more residues within a sequence. Mutations are typically described herein by identifying the original residue followed by the position of the residue within the sequence and by the identity of the newly substituted residue. Various methods for making the amino acid substitutions (mutations) provided herein are well known in the art, and are provided by, for example, Green and Sambrook, Molecular Cloning: A Laboratory Manual (4^{th} ed., Cold Spring Harbor Laboratory Press, Cold Spring Harbor, N.Y. (2012)).

[0092] The terms “nucleic acid” and “nucleic acid molecule,” as used herein, refer to a compound comprising a nucleobase and an acidic moiety, e.g., a nucleoside, a nucleotide, or a polymer of nucleotides. Typically, polymeric nucleic acids, e.g., nucleic acid molecules comprising three or more nucleotides are linear molecules, in which adjacent nucleotides are linked to each other via a phosphodiester linkage. In some embodiments, “nucleic acid” refers to individual nucleic acid residues (e.g., nucleotides and/or nucleosides). In some embodiments, “nucleic acid” refers to an oligonucleotide chain comprising three or more individual nucleotide residues. As used herein, the terms “oligonucleotide” and “polynucleotide” can be used interchangeably to refer to a polymer of nucleotides (e.g., a string of at least three nucleotides). In some embodiments, “nucleic acid” encompasses RNA as well as single and/or double-stranded DNA. Nucleic acids may be naturally occurring, for example, in the context of a genome, a transcript, an mRNA, tRNA, rRNA, siRNA, snRNA, a plasmid, cosmid, chromosome, chromatid, or other naturally occurring nucleic acid molecule. On the other hand, a nucleic acid molecule may be a non-naturally occurring molecule, e.g., a recombinant DNA or RNA, an artificial chromosome, an engineered genome, or fragment thereof, or a synthetic DNA, RNA, DNA/RNA hybrid, or including non-naturally occurring nucleotides or nucleosides. Furthermore, the terms “nucleic acid,” “DNA,” “RNA,” and/or similar terms include nucleic acid analogs, e.g., analogs having other than a phosphodiester backbone. Nucleic acids can be purified from natural sources, produced using recombinant expression systems and optionally purified, chemically synthesized, etc. Where appropriate, e.g., in the case of chemically synthesized molecules, nucleic acids comprise nucleoside analogs such as analogs having chemically modified bases or sugars, and backbone modifications. A nucleic acid sequence is presented in the 5′ to 3′ direction unless otherwise indicated. In some embodiments, a nucleic acid is or comprises natural nucleosides (e.g. adenosine, thymidine, guanosine, cytidine, uridine, deoxyadenosine, deoxythymidine, deoxyguanosine, and deoxycytidine); nucleoside analogs (e.g., 2-aminoadenosine, 2-thiothymidine, inosine, pyrrolo-pyrimidine, 3-methyl adenosine, 5-methylcytidine, 2-aminoadenosine, C5-bromouridine, C5-fluorouridine, C5-iodouridine, C5-propynyl-uridine, C5-propynyl-cytidine, C5-methylcytidine, 2-aminoadenosine, 7-deazaadenosine, 7-deazaguanosine, 8-oxoadenosine, 8-oxoguanosine, 0(6)-methylguanine, and 2-thiocytidine); chemically modified bases; biologically modified bases (e.g., methylated bases); intercalated bases; modified sugars (e.g., 2′-fluororibose, ribose, 2′-deoxyribose, arabinose, and hexose); and/or modified phosphate groups (e.g., phosphorothioates and 5′-N-phosphoramidite linkages).

[0093] The term “nuclear localization sequence,” “nuclear localization signal,” or “NLS” refers to an amino acid sequence that promotes import of a protein into the cell nucleus. Nuclear localization sequences are known in the art and described, for example, in Plank et al., International PCT application, PCT/EP2000/011690, filed Nov. 23, 2000, published as WO/2001/038547 on May 31, 2001, the contents of which are incorporated herein by reference for their disclosure of exemplary nuclear localization sequences. In other embodiments, the NLS is an optimized NLS described, for example, by Koblan et al., Nature Biotech. 2018 doi:10.1038/nbt.4172. In some embodiments, an NLS comprises the amino acid sequence KRTADGSEFESPKKKRKV (SEQ ID NO: 190), KRPAATKKAGQAKKKK (SEQ ID NO: 191), KKTELQTTNAENKTKKL (SEQ ID NO: 192), KRGINDRNFWRGENGRKTR (SEQ ID NO: 193), RKSGKIAAIVVKRPRK (SEQ ID NO: 194), PKKKRKV (SEQ ID NO: 195), MDSLLMNRRKFLYQFKNVRWAKGRRETYLC (SEQ ID NO: 196), PKKKRKVEGADKRTADGSE FESPKKKRKV (SEQ ID NO: 328), or RKSGKIAAIVVKRPRKPKKKRKV (SEQ ID NO: 329).

[0094] The term “nucleobase,” “nitrogenous base,” or “base,” used interchangeably herein, refers to a nitrogen-containing biological compound that forms a nucleoside, which in turn is a component of a nucleotide. The ability of nucleobases to form base pairs and to stack one upon another leads directly to long-chain helical structures such as ribonucleic acid (RNA) and deoxyribonucleic acid (DNA). Five nucleobases—adenine (A), cytosine (C), guanine (G), thymine (T), and uracil (U)—are called primary or canonical. Adenine and guanine are derived from purine, and cytosine, uracil, and thymine are derived from pyrimidine. DNA and RNA can also contain other (non-primary) bases that are modified. Non-limiting exemplary modified nucleobases can include hypoxanthine, xanthine, 7-methylguanine, 5,6-dihydrouracil, 5-methylcytosine (m5C), and 5-hydromethylcytosine. Hypoxanthine and xanthine can be created through mutagen presence, both of them through deamination (replacement of the amine group with a carbonyl group). Hypoxanthine can be modified from adenine. Xanthine can be modified from guanine. Uracil can result from deamination of cytosine. A “nucleoside” consists of a nucleobase and a five carbon sugar (either ribose or deoxyribose). Examples of a nucleoside include adenosine, guanosine, uridine, cytidine, 5-methyluridine (m5U), deoxyadenosine, deoxyguanosine, thymidine, deoxyuridine, and deoxycytidine. Examples of a nucleoside with a modified nucleobase includes inosine (I), xanthosine (X), 7-methylguanosine (m7G), dihydrouridine (D), 5-methylcytidine (m5C), and pseudouridine (Ψ). A “nucleotide” consists of a nucleobase, a five carbon sugar (either ribose or deoxyribose), and at least one phosphate group. Non-limiting examples of modified nucleobases and/or chemical modifications that a modified nucleobase may include are the following: pseudo-uridine, 5-Methyl-cytosine, 2′-O-methyl-3′-phosphonoacetate, 2′-O-methyl thioPACE (MSP), 2′-O-methyl-PACE (MP), 2′-fluoro RNA (2′-F-RNA), constrained ethyl (S-cEt), 2′-O-methyl (‘M’), 2′-O-methyl-3′-phosphorothioate (‘MS’), 2′-O-methyl-3′-thiophosphonoacetate (‘MSP’), 5-methoxyuridine, phosphorothioate, and N1-Methylpseudouridine.

[0095] The term “nucleic acid programmable DNA binding protein” or “napDNAbp” may be used interchangeably with “polynucleotide programmable nucleotide binding domain” to refer to a protein that associates with a nucleic acid (e.g., DNA or RNA), such as a guide nucleic acid or guide polynucleotide (e.g., gRNA), that guides the napDNAbp to a specific nucleic acid sequence. In some embodiments, the polynucleotide programmable nucleotide binding domain is a polynucleotide programmable DNA binding domain. In some embodiments, the polynucleotide programmable nucleotide binding domain is a polynucleotide programmable RNA binding domain. In some embodiments, the polynucleotide programmable nucleotide binding domain is a Cas9 protein. A Cas9 protein can associate with a guide RNA that guides the Cas9 protein to a specific DNA sequence that is complementary to the guide RNA. In some embodiments, the napDNAbp is a Cas9 domain, for example a nuclease active Cas9, a Cas9 nickase (nCas9), or a nuclease inactive Cas9 (dCas9). Non-limiting examples of nucleic acid programmable DNA binding proteins include, Cas9 (e.g., dCas9 and nCas9), Cas12a/Cpf1, Cas12b/C2c1, Cas12c/C2c3, Cas12d/CasY, Cas12e/CasX, Cas12g, Cas12h, Cas12i, and Cas12j/CasΦ (Cas12j/Casphi). Non-limiting examples of Cas enzymes include Cas1, Cas1B, Cas2, Cas3, Cas4, Cas5, Cas5d, Cas5t, Cas5h, Cas5a, Cas6, Cas7, Cas8, Cas8a, Cas8b, Cas8c, Cas9 (also known as Csn1 or Csx12), Cas10, Cas10d, Cas12a/Cpf1, Cas12b/C2c1, Cas12c/C2c3, Cas12d/CasY, Cas12e/CasX, Cas12g, Cas12h, Cas12i, Cas12j/CasΦ, Cpf1, Csy1, Csy2, Csy3, Csy4, Cse1, Cse2, Cse3, Cse4, Cse5e, Csc1, Csc2, Csa5, Csn1, Csn2, Csm1, Csm2, Csm3, Csm4, Csm5, Csm6, Cmr1, Cmr3, Cmr4, Cmr5, Cmr6, Csb1, Csb2, Csb3, Csx17, Csx14, Csx10, Csx16, CsaX, Csx3, Csx1, Csx1S, Csx11, Csf1, Csf2, CsO, Csf4, Csd1, Csd2, Cst1, Cst2, Csh1, Csh2, Csa1, Csa2, Csa3, Csa4, Csa5, Type II Cas effector proteins, Type V Cas effector proteins, Type VI Cas effector proteins, CARF, DinG, homologues thereof, or modified or engineered versions thereof. Other nucleic acid programmable DNA binding proteins are also within the scope of this disclosure, although they may not be specifically listed in this disclosure. See, e.g., Makarova et al. “Classification and Nomenclature of CRISPR-Cas Systems: Where from Here?” CRISPR J. 2018 October; 1:325-336. doi: 10.1089/crispr.2018.0033; Yan et al., “Functionally diverse type V CRISPR-Cas systems” Science. 2019 Jan. 4; 363(6422):88-91. doi: 10.1126/science.aav7271, the entire contents of each are hereby incorporated by reference. Exemplary nucleic acid programmable DNA binding proteins and nucleic acid sequences encoding nucleic acid programmable DNA binding proteins are provided in the Sequence Listing as SEQ ID NOs: 197-245, 254-260, and 378.

[0096] The terms “nucleobase editing domain” or “nucleobase editing protein,” as used herein, refers to a protein or enzyme that can catalyze a nucleobase modification in RNA or DNA, such as cytosine (or cytidine) to uracil (or uridine) or thymine (or thymidine), and adenine (or adenosine) to hypoxanthine (or inosine) deaminations, as well as non-templated nucleotide additions and insertions. In some embodiments, the nucleobase editing domain is a deaminase domain (e.g., an adenine deaminase or an adenosine deaminase).

[0097] As used herein, “obtaining” as in “obtaining an agent” includes synthesizing, purchasing, or otherwise acquiring the agent.

[0098] By “subject” or “patient” is meant a mammal, including, but not limited to, a human or non-human mammal. In embodiments, the mammal is a bovine, equine, canine, ovine, rabbit, rodent, nonhuman primate, or feline. In an embodiment, “patient” refers to a mammalian subject with a higher than average likelihood of developing a disease or a disorder. Exemplary patients can be humans, non-human primates, cats, dogs, pigs, cattle, cats, horses, camels, llamas, goats, sheep, rodents (e.g., mice, rabbits, rats, or guinea pigs) and other mammalians that can benefit from the therapies disclosed herein. Exemplary human patients can be male and/or female.

[0099] “Patient in need thereof” or “subject in need thereof” is referred to herein as a patient diagnosed with, at risk or having, predetermined to have, or suspected of having a disease or disorder.

[0100] The terms “pathogenic mutation”, “pathogenic variant”, “disease causing mutation”, “disease causing variant”, “deleterious mutation”, or “predisposing mutation” refers to a genetic alteration or mutation that is associated with a disease or disorder or that increases an individual's susceptibility or predisposition to a certain disease or disorder. In some embodiments, the pathogenic mutation comprises at least one wild-type amino acid substituted by at least one pathogenic amino acid in a protein encoded by a gene. In some embodiments, the pathogenic mutation is in a terminating region (e.g., stop codon). In some embodiments, the pathogenic mutation is in a non-coding region (e.g., intron, promoter, etc.).

[0101] The terms “protein”, “peptide”, “polypeptide”, and their grammatical equivalents are used interchangeably herein, and refer to a polymer of amino acid residues linked together by peptide (amide) bonds. A protein, peptide, or polypeptide can be naturally occurring, recombinant, or synthetic, or any combination thereof.

[0102] The term “fusion protein” as used herein refers to a hybrid polypeptide which comprises protein domains from at least two different proteins.

[0103] The term “recombinant” as used herein in the context of proteins or nucleic acids refers to proteins or nucleic acids that do not occur in nature but are the product of human engineering. For example, in some embodiments, a recombinant protein or nucleic acid molecule comprises an amino acid or nucleotide sequence that comprises at least one, at least two, at least three, at least four, at least five, at least six, or at least seven mutations as compared to any naturally occurring sequence.

[0104] By “reduces” is meant a negative alteration of at least 10%, 25%, 50%, 75%, or 100%.

[0105] By “reference” is meant a standard or control condition. In one embodiment, the reference is a wild-type or healthy cell. In other embodiments and without limitation, a reference is an untreated cell that is not subjected to a test condition, or is subjected to placebo or normal saline, medium, buffer, and/or a control vector that does not harbor a polynucleotide of interest. In some cases, a “reference” is an untreated subject, such as a subject not administered a hematopoietic stem cell edited according to the methods of the present disclosure. In some cases the subject is a healthy subject (e.g., a subject not having sickle cell disease). In some embodiments, the reference is an unedited or wild type cell, polypeptide, or polynucleotide.

[0106] A “reference sequence” is a defined sequence used as a basis for sequence comparison. A reference sequence may be a subset of or the entirety of a specified sequence; for example, a segment of a full-length cDNA or gene sequence, or the complete cDNA or gene sequence. For polypeptides, the length of the reference polypeptide sequence will generally be at least about 16 amino acids, at least about 20 amino acids, at least about 25 amino acids, about 35 amino acids, about 50 amino acids, or about 100 amino acids. For nucleic acids, the length of the reference nucleic acid sequence will generally be at least about 50 nucleotides, at least about 60 nucleotides, at least about 75 nucleotides, about 100 nucleotides or about 300 nucleotides or any integer thereabout or therebetween. In some embodiments, a reference sequence is a wild-type sequence of a protein of interest. In other embodiments, a reference sequence is a polynucleotide sequence encoding a wild-type protein.

[0107] The term “RNA-programmable nuclease,” and “RNA-guided nuclease” refer to a nuclease that forms a complex with (e.g., binds or associates with) one or more RNA(s) that is not a target for cleavage. In some embodiments, an RNA-programmable nuclease, when in a complex with an RNA, may be referred to as a nuclease-RNA complex. Typically, the bound RNA(s) is referred to as a guide RNA (gRNA). In some embodiments, the RNA-programmable nuclease is the (CRISPR-associated system) Cas9 endonuclease, for example, Cas9 (Csnl) from Streptococcus pyogenes (e.g., SEQ ID NO: 197), Cas9 from Neisseria meningitidis (NmeCas9; SEQ ID NO: 208), Nme2Cas9 (SEQ ID NO: 209), Streptococcus constellatus (ScoCas9), or derivatives thereof (e.g., a sequence with at least about 85% sequence identity to a Cas9, such as Nme2Cas9 or spCas9).

[0108] Amino acids generally can be grouped into classes according to the following common side-chain properties:
[0109] (1) hydrophobic: Norleucine, Met, Ala, Val, Leu, He;
[0110] (2) neutral hydrophilic: Cys, Ser, Thr, Asn, Gin;
[0111] (3) acidic: Asp, Glu;
[0112] (4) basic: His, Lys, Arg;
[0113] (5) residues that influence chain orientation: Gly, Pro;
[0114] (6) aromatic: Trp, Tyr, Phe.

[0115] In some embodiments, conservative substitutions can involve the exchange of a member of one of these classes for another member of the same class. In some embodiments, non-conservative amino acid substitutions can involve exchanging a member of one of these classes for another class.

[0116] The term “single nucleotide polymorphism (SNP)” is a variation in a single nucleotide that occurs at a specific position in the genome, where each variation is present to some appreciable degree within a population (e.g., >1%). For example, at a specific base position in the human genome, the C nucleotide can appear in most individuals, but in a minority of individuals, the position is occupied by an A. This means that there is a SNP at this specific position, and the two possible nucleotide variations, C or A, are said to be alleles for this position. SNPs underlie differences in susceptibility to disease. The severity of illness and the way our body responds to treatments are also manifestations of genetic variations. SNPs can fall within coding regions of genes, non-coding regions of genes, or in the intergenic regions (regions between genes). In some embodiments, SNPs within a coding sequence do not necessarily change the amino acid sequence of the protein that is produced, due to degeneracy of the genetic code. SNPs in the coding region are of two types: synonymous and nonsynonymous SNPs. Synonymous SNPs do not affect the protein sequence, while nonsynonymous SNPs change the amino acid sequence of protein. The nonsynonymous SNPs are of two types: missense and nonsense. SNPs that are not in protein-coding regions can still affect gene splicing, transcription factor binding, messenger RNA degradation, or the sequence of noncoding RNA. Gene expression affected by this type of SNP is referred to as an eSNP (expression SNP) and can be upstream or downstream from the gene. A single nucleotide variant (SNV) is a variation in a single nucleotide without any limitations of frequency and can arise in somatic cells. A somatic single nucleotide variation can also be called a single-nucleotide alteration.

[0117] By “selectively binds” is meant specifically binds a wild type version of the cell surface protein but exhibits reduced binding or fails to detectably bind to the cell surface protein comprising a mutation. In embodiments, an antibody of the present disclosure selectively binds to a wild type CD117 polypeptide but exhibits reduced binding to a CD117 polypeptide comprising one or more amino acid alterations, such as those provided herein, relative to the wild type CD117 polypeptide. In embodiments, an antibody of the present disclosure binds a wild type CD117 polypeptide 1.1-fold, 1.2-fold, 1.3-fold, 1.4-fold, 1-fold, 5-fold, 1.75-fold, 2-fold, 3-fold, 4-fold, 5-fold, 6-fold, 7-fold, 8-fold, 9-fold, 10-fold, 100-fold, 1000-fold, 10000-fold, 100000-fold, or 1000000-fold more strongly (e.g., as quantified using KD(M), where a lower KD(M) indicates stronger binding) than to an altered CD117 polypeptide of the present disclosure.

[0118] By “specifically binds” is meant a nucleic acid molecule, polypeptide, polypeptide/polynucleotide complex, compound, or molecule that recognizes and binds a polypeptide and/or nucleic acid molecule of the disclosure, but which does not substantially recognize and bind other molecules in a sample, for example, a biological sample.

[0119] By “substantially identical” is meant a polypeptide or nucleic acid molecule exhibiting at least 50% identity to a reference amino acid sequence. In one embodiment, a reference sequence is a wild-type amino acid or nucleic acid sequence. In another embodiment, a reference sequence is any one of the amino acid or nucleic acid sequences described herein. In one embodiment, such a sequence is at least about 60%, 80%, 85%, 90%, 95%, 96%, 97%, 98%, 99%, 99.9%, or even 99.99%, identical at the amino acid level or nucleic acid level to the sequence used for comparison.

[0120] Sequence identity is typically measured using sequence analysis software (for example, Sequence Analysis Software Package of the Genetics Computer Group, University of Wisconsin Biotechnology Center, 1710 University Avenue, Madison, Wis. 53705, BLAST, BESTFIT, GAP, or PILEUP/PRETTYBOX programs). Such software matches identical or similar sequences by assigning degrees of homology to various substitutions, deletions, and/or other modifications. Conservative substitutions typically include substitutions within the following groups: glycine, alanine; valine, isoleucine, leucine; aspartic acid, glutamic acid, asparagine, glutamine; serine, threonine; lysine, arginine; and phenylalanine, tyrosine.

[0121] Nucleic acid molecules useful in the methods of the disclosure include any nucleic acid molecule that encodes a polypeptide of the disclosure or a functional fragment thereof. Such nucleic acid molecules need not be 100% identical with an endogenous nucleic acid sequence but will typically exhibit substantial identity. Polynucleotides having “substantial identity” to an endogenous sequence are typically capable of hybridizing with at least one strand of a double-stranded nucleic acid molecule. Nucleic acid molecules useful in the methods of the disclosure include any nucleic acid molecule that encodes a polypeptide of the disclosure or a functional fragment thereof. Such nucleic acid molecules need not be 100% identical with an endogenous nucleic acid sequence but will typically exhibit substantial identity. Polynucleotides having “substantial identity” to an endogenous sequence are typically capable of hybridizing with at least one strand of a double-stranded nucleic acid molecule. By “hybridize” is meant pair to form a double-stranded molecule between complementary polynucleotide sequences (e.g., a gene described herein), or portions thereof, under various conditions of stringency. (See, e.g., Wahl, G. M. and S. L. Berger (1987) Methods Enzymol. 152:399; Kimmel, A. R. (1987) Methods Enzymol. 152:507).

[0122] By “split” is meant divided into two or more fragments.

[0123] A “split polypeptide” or “split protein” refers to a protein that is provided as an N-terminal fragment and a C-terminal fragment translated as two separate polypeptides from a nucleotide sequence(s). The polypeptides corresponding to the N-terminal portion and the C-terminal portion of the split protein may be spliced in some embodiments to form a “reconstituted” protein. In embodiments, the split polypeptide is a nucleic acid programmable DNA binding protein (e.g. a Cas9) or a base editor.

[0124] The term “target site” refers to a nucleotide sequence or nucleobase of interest within a nucleic acid molecule that is modified. In embodiments, the modification is deamination of a base. The deaminase can be an adenine deaminase. The fusion protein or base editing complex comprising a deaminase may comprise a dCas9-adenosine deaminase fusion protein, a Cas12b-adenosine deaminase fusion, or a base editor disclosed herein.

[0125] As used herein, the terms “treat,” treating,” “treatment,” and the like refer to reducing or ameliorating a disorder and/or symptoms associated therewith or obtaining a desired pharmacologic and/or physiologic effect. It will be appreciated that, although not precluded, treating a disorder or condition does not require that the disorder, condition or symptoms associated therewith be completely eliminated. In some embodiments, the effect is therapeutic, i.e., without limitation, the effect partially or completely reduces, diminishes, abrogates, abates, alleviates, decreases the intensity of, or cures a disease and/or adverse symptom attributable to the disease. In some embodiments, the effect is preventative, i.e., the effect protects or prevents an occurrence or reoccurrence of a disease or condition. To this end, the presently disclosed methods comprise administering a therapeutically effective amount of a composition as described herein. In some embodiments, the disease or disorder is sickle cell disease (SCD) or ß-thalassemia.

[0126] As used herein, the term “vector” refers to a means of introducing a nucleic acid molecule into a cell, resulting in a transformed cell. Vectors include plasmids, transposons, phages, viruses, liposomes, lipid nanoparticles, and episomes. “Expression vectors” are nucleic acid sequences comprising the nucleotide sequence to be expressed in the recipient cell. Expression vectors contain a polynucleotide sequence as well as additional nucleic acid sequences to promote and/or facilitate the expression of the introduced sequence, such as start, stop, enhancer, promoter, and secretion sequences, into the genome of a mammalian cell. Examples of vectors include nucleic acid vectors, e.g., DNA vectors, such as plasmids, RNA vectors, viruses or other suitable replicons (e.g., viral vectors). A variety of vectors have been developed for the delivery of polynucleotides encoding exogenous proteins into a prokaryotic or eukaryotic cell. Examples of such expression vectors are disclosed in, e.g., WO 1994/11026; incorporated herein by reference. Certain vectors that can be used for the expression of antibodies and antibody fragments of some aspects and embodiments herein include plasmids that contain regulatory sequences, such as promoter and enhancer regions, which direct gene transcription. Other useful vectors for expression of antibodies and antibody fragments contain polynucleotide sequences that enhance the rate of translation of these genes or improve the stability or nuclear export of the mRNA that results from gene transcription. These sequence elements include, e.g., 5′ and 3′ untranslated regions, an internal ribosomal entry site (IRES), and polyadenylation signal site in order to direct efficient transcription of the gene carried on the expression vector. The expression vectors of some aspects and embodiments herein may also contain a polynucleotide encoding a marker for selection of cells that contain such a vector. Examples of a suitable marker include genes that encode resistance to antibiotics, such as ampicillin, chloramphenicol, kanamycin, or nourseothricin.

[0127] Ranges provided herein are understood to be shorthand for all of the values within the range. For example, a range of 1 to 50 is understood to include any number, combination of numbers, or sub-range from the group consisting 1, 2, 3, 4, 5, 6, 7, 8, 9, 10, 11, 12, 13, 14, 15, 16, 17, 18, 19, 20, 21, 22, 23, 24, 25, 26, 27, 28, 29, 30, 31, 32, 33, 34, 35, 36, 37, 38, 39, 40, 41, 42, 43, 44, 45, 46, 47, 48, 49, or 50.

[0128] The recitation of a listing of chemical groups in any definition of a variable herein includes definitions of that variable as any single group or combination of listed groups. The recitation of an embodiment for a variable or aspect herein includes that embodiment as any single embodiment or in combination with any other embodiments or portions thereof.

[0129] All terms are intended to be understood as they would be understood by a person skilled in the art. Unless defined otherwise, all technical and scientific terms used herein have the same meaning as commonly understood by one of ordinary skill in the art to which the disclosure pertains

[0130] In this application, the use of the singular includes the plural unless specifically stated otherwise. It must be noted that, as used in the specification, the singular forms “a,” “an” and “the” include plural referents unless the context clearly dictates otherwise. In this application, the use of “or” means “and/or” unless stated otherwise. Furthermore, use of the term “including” as well as other forms, such as “include”, “includes,” and “included,” is not limiting.

[0131] As used in this specification and claim(s), the words “comprising” (and any form of comprising, such as “comprise” and “comprises”), “having” (and any form of having, such as “have” and “has”), “including” (and any form of including, such as “includes” and “include”) or “containing” (and any form of containing, such as “contains” and “contain”) are inclusive or open-ended. This wording indicates that specified elements, features, components, and/or method steps are present, but does not exclude the presence of other elements, features, components, and/or method steps. Any embodiments specified as “comprising” a particular component(s) or element(s) are also contemplated as “consisting of” or “consisting essentially of” the particular component(s) or element(s) in some embodiments. It is contemplated that any embodiment discussed in this specification can be implemented with respect to any method or composition of the present disclosure, and vice versa. Furthermore, compositions of the present disclosure can be used to achieve methods of the present disclosure.

[0132] The term “about” or “approximately” means within an acceptable error range for the particular value as determined by one of ordinary skill in the art, which will depend in part on how the value is measured or determined, i.e., the limitations of the measurement system.

[0133] Reference in the specification to “some embodiments,” “an embodiment,” “one embodiment” or “other embodiments” means that a particular feature, structure, or characteristic described in connection with the embodiments is included in at least some embodiments, but not necessarily all embodiments, of the present disclosures.

### BRIEF DESCRIPTION OF THE DRAWINGS

[0134] FIGS. 1A-1C depict plasmids. FIG. 1A is a map of an expression vector encoding a TadA7.10-dCas9 base editor. FIG. 1B is a map of a plasmid comprising nucleic acid molecules encoding proteins that confer chloramphenicol resistance (CamR) and spectinomycin resistance (SpectR). The plasmid also comprises a kanamycin resistance gene disabled by two point mutations. FIG. 1C is a map of a plasmid comprising nucleic acid molecules encoding proteins that confer chloramphenicol resistance (CamR) and spectinomycin resistance (SpectR). The plasmid also comprises a kanamycin resistance gene disabled by three point mutations.

[0135] FIG. 2 presents images of bacterial colonies transduced with the expression vectors depicted in FIG. 1, which included a defective kanamycin resistance gene. The vectors contained ABE7.10 variants that were generated using error prone PCR. Bacterial cells expressing these “evolved” ABE7.10 variants were selected for kanamycin resistance using increasing concentrations of kanamycin. Bacteria expressing ABE7.10 variants having adenosine deaminase activity were capable of correcting the mutations introduced into the kanamycin resistance gene, thereby restoring kanamycin resistance. The kanamycin resistant cells were selected for further analysis.

[0136] FIGS. 3A and 3B illustrate editing of a regulatory region of the hemoglobin subunit gamma (HBG1) locus, which is a therapeutically relevant site for upregulation of fetal hemoglobin. FIG. 3B is a schematic of a portion of the regulatory region for the HBG1 gene. FIG. 3A discloses SEQ ID NO: 432. FIG. 3A provides a bar graph that quantifies the efficiency and specificity of adenosine deaminase variants listed in Table 15. Editing was assayed at the hemoglobin subunit gamma 1 (HBG1) locus in HEK293T cells, which was therapeutically relevant site for upregulation of fetal hemoglobin. The top panel depicts nucleotide residues in the target region of the regulatory sequence of the HBG1 gene. A5, A8, A9, and A11 denote the edited adenosine residues in HBG1, as indicated above the target sequence shown in FIG. 3A. FIG. 3B discloses SEQ ID NOs: 433 and 434, where SEQ ID NO: 433 and 434 are reverse complements of one another.

[0137] FIG. 4 illustrates the relative effectiveness of adenosine base editors comprising a dCas9 that recognizes a noncanonical PAM sequence. The top panel depicts the coding sequence of the hemoglobin subunit. The bottom panel is a graph demonstrating the efficiency of adenosine deaminase variant base editors with guide RNAs of varying lengths. FIG. 4 discloses SEQ ID NOs: 435 and 437 respectively, in order of appearance.

[0138] FIG. 5 is a bar graph illustrating the efficiency and specificity of ABE8s. The percent editing at intended target nucleotides and unintended target nucleotides (bystanders) is quantified. FIG. 5 discloses SEQ ID NOs: 438 and 435, respectively, in order of appearance.

[0139] FIG. 6 is a bar graph illustrating the efficiency and specificity of ABE8s. The percent editing at intended target nucleotides and unintended target nucleotides (bystanders) is quantified.

[0140] FIG. 7 provides a stacked bar graph showing percent target, bystander, and non-synonymous bystander A>G edits corresponding to the indicated base editors. In FIG. 7 each bar indicates from top-to-bottom “other non-synonymous bystanders”, “1G bystander”, and “favorable” edits. In FIG. 7 “XVIVO” refers to the serum free stem cell medium in which cells were grown, “IVD” refers to “in vitro differentiated erythroid cultures (IVD)”, and “d5” and “d7” refer to five days and seven days, respectively.

[0141] FIG. 8 provides a stacked bar graph showing editing efficiencies (A to G %) for the base editors ABE8.20-NRCH (1570), ABE9v1-NRCH (2517), and ABE9v2 (2518) used in combination with the guide gRNA931. In each stacked bar of FIG. 8, the following edits are shown in order from top-to-bottom: “3G_4G_6G,” “4G_6G,” “3G_6G,” and “6G.”

[0142] FIG. 9 provides histograms showing that cells expressing CD117 polypeptides altered using ABE8.20-NRCH (1570), ABE9v1-NRCH (2517), or ABE9v2 (2518) in combination with the guide gRNA931 showed reduced binding to the antibody ABTx052. Cells were evaluated 2 days post-electroporation (EP). In FIG. 9, “1” indicates cells edited using ABE8.20-NRCH, “2” indicates cells edited using ABE9v1-NRCH, and “3” indicates cells edited using ABE9v2.

[0143] FIG. 10 provides a bar graph showing engraftment of base-edited hCD34+ in NBSGW mice at 16-weeks post-transplantation. The bar graph of FIG. 10 shows the percent of each indicated hCD34+ cell type that contained base edited beta globin polynucleotides containing one of the following base modifications (i.e., “Makassar Conversion (%)”): 9G, 9G+11G, 9G+11G+14G, 5T+9G+11G, where the numbers indicate the nucleotide location of each alteration, and where each alteration is indicated relative to the following sequence, where subscripts indicate the nucleotide locations: ACTTC₅TCCA₉CA₁₁GGA₁₄GTCAGATGC (SEQ ID NO: 439). In FIG. 10, the leftmost five bars correspond to mice transplanted with unedited CD34+ cells and the rightmost five bars correspond to mice transplanted with base edited CD34+ cells.

[0144] FIGS. 11A-11G provide bar graphs showing engraftment and multilineage reconstitution at 16 weeks post-hCD34+ cell transplant in immunocompromised NBSGW (NOD.Cg-Kit^{W-41J} Tyr⁺ Prkdc^{scid} Il2rg^{tm1Wjl}/ThomJ) mice (6-8 weeks, female). The mice were transplanted with 1e6 base edited or unedited hCD34+ cells. At 16 weeks post transplantation, mice were euthanized, and bone marrow was harvested from the pelvic bones, tibias and femurs. Frequency of cell populations were determined using flow cytometry. Bulk bone marrow (BM) cells were stained with reagents against hCD45, mCD45, hCD34, hCD33, hCD15, hCD19, GlyA, hCD16, hCD56, and LIVE/DEAD Fixable Aqua Dead Cell Stain Kit. Base editing did not alter engraftment of the hCD34+ cells or multilineage reconstitution potential.

### DETAILED DESCRIPTION

[0145] The disclosure features adenosine deaminase base editors, compositions comprising the same, and methods for use thereof for altering a target nucleobase in a polynucleotide sequence. In some embodiments, the base editors of the disclosure may be used to treat a disease or disorder, such as a hemoglobinopathy (e.g., sickle cell disease (SCD)).

[0146] The aspects of the disclosure and embodiments thereof are based, at least in part, on the discovery, as described in the Examples provided herein, of new adenosine deaminase variants useful in altering a nucleobase of a polynucleotide sequence. Accordingly, the disclosure provides new adenosine deaminase variants useful in the methods provided herein for altering polynucleotide sequences.

### Cluster of Differentiation 117 (CD117; C-Kit)

[0147] CD117 is expressed in hematopoietic stem cells (HSCs) and is critical for their self-renewal, survival & differentiation. Upon differentiation, CD117 expression is lost. Mature mast cells retain CD117 expression. High level of expression the long term and short-term HSCs make CD117 an attractive target for immunologic conditioning.

[0148] Therefore, one approach to eliminate hematopoietic stem cells from a niche is to contact the cells with an anti-CD117 antibody that interferes with proper functioning of the CD117 polypeptide (e.g., blocks binding to SCF). Accordingly, CD117/c-KIT is a target for hematopoietic stem cell transplantation (HSCT) antibody-based conditioning. Non-limiting examples of antibodies suitable for use in the methods of the disclosure include ABTx052. In embodiments, a CD117 variant prepared according to the methods of the disclosure has reduced binding to ABTx052 relative to a wild type CD117 polypeptide.

[0149] Critical events in the DCD117 life cycle include SCF binding, CD117 homo-dimerization, trans-phosphorylation of tyrosine residues, ubiquitinization, internalization, and proteolytic degradation. Trans-phosphorylation of the tyrosine residues is associated with cell activation and downstream phosphorylation, calcium mobilization, and cell migration.

### HBB Gene Editing

[0150] As described herein, the compositions and methods of the invention are useful and advantageous for the treatment of sickle cell disease (SCD), which is caused by a Glu→Val mutation at the sixth amino acid of the β-globin protein encoded by the HBB gene. Despite many developments to date in the field of gene editing, precise correction of the diseased HBB gene to revert Val→Glu is presently not achievable using either CRISPR/Cas nuclease or CRISPR/Cas base editing approaches.

[0151] Genome editing of the HBB gene to replace the affected nucleotide using a CRISPR/Cas nuclease approach requires cleavage of genomic DNA. However, cleavage of genomic DNA carries an increased risk of generating base insertions/deletions (indels), which have the potential to cause unintended and undesirable consequences, including generating premature stop codons, altering the codon reading frame, etc. Furthermore, generating double-stranded breaks at the β-globin locus has the potential to radically alter the locus through recombination events. The β-globin locus contains a cluster of globin genes having sequence identity to one another—5′-ε-; Gγ-; Aγ-; δ-; and β-globin-3′. Because of the structure of the β-globin locus, recombination repair of a double-stranded break within the locus has the potential to result in gene loss of intervening sequences between globin genes, for example between δ- and β-globin genes.

[0152] Unintended alterations to the locus also carry a risk of causing thalassemia. CRISPR/Cas base editing approaches hold promise in that they have the ability to generate precise alterations at the nucleobase level. However, precise correction of Val→Glu (GTG→→GAG) requires a T•A to A•T transversion editor, which is not presently known to exist. Additionally, the specificity of CRISPR/Cas base editing is due in part to a limited window of editable nucleotides created by R-loop formation upon CRISPR/Cas binding to DNA. Thus, CRISPR/Cas targeting must occur at or near the sickle cell site to allow base editing to be possible, and there may be additional sequence requirements for optimal editing within the window. One requirement for CRISPR/Cas targeting is the presence of a protospacer-adjacent motif (PAM) flanking the site to be targeted. For example, many base editors are based on SpCas9 which requires an NGG PAM. Even assuming hypothetically that an T•A to A•T transversion were possible, no NGG PAM exists that would place the target “A” at a desirable position for such an SpCas9 base editor. Although many new CRISPR/Cas proteins have been discovered or generated that expand the collection of available PAMs, PAM requirements remain a limiting factor in the ability to direct CRISPR/Cas base editors to specific nucleotides at any location in the genome.

[0153] The present invention is based, at least in part, on several discoveries described herein that address the foregoing challenges for providing a genome editing approach for treatment of sickle cell anemia. In one aspect, the invention is based in part on the ability to replace the valine at amino acid position 6, which causes sickle cell disease, with an alanine, to thereby generate an Hb variant (Hb Makassar) that does not generate a sickle cell phenotype. While precise correction (GTG→GAG) is not possible without a T•A to A•T transversion base editor, the studies performed herein have found that a Val→Ala (GTG→GCG) replacement (i.e., the Hb Makassar variant) can be generated using an A•T to G•C base editor (ABE). In some embodiments, the methods of the invention involve detecting an Hb Makassar variant using an antibody, such as an antibody selected from those described in U.S. Provisional Patent Application No. 63/329,109, filed Apr. 8, 2022. This was achieved in part by the development of novel base editors and novel base editing strategies, as provided herein. For example, novel ABE base editors (i.e., having an adenosine deaminase domain) that utilize flanking sequences (e.g., PAM sequences; zinc finger binding sequences) for optimal base editing at the sickle cell target site.

[0154] Thus, the present invention includes compositions and methods for base editing a thymidine (T) to a cytidine (C) in the codon of the sixth amino acid of a sickle cell disease variant of the β-globin protein (Sickle HbS; E6V), thereby substituting an alanine for a valine (V6A) at this amino acid position. Substitution of alanine for valine at position 6 of HbS generates a β-globin protein variant that does not have a sickle cell phenotype (e.g., does not have the potential to polymerize as in the case of the pathogenic variant HbS). Accordingly, the compositions and methods of the invention are useful for the treatment of sickle cell disease (SCD).

HBG1 and/or HBG2 Promoter Editing

[0155] Sickle cell disease (SCD) affects approximately 100,000 patients in the United States. Individuals carrying both the SCD mutation and mutations that cause persistence of fetal hemoglobin (HPFH) do not typically present with sickle cell pathologies due to persistent fetal hemoglobin (HbF) levels. Higher HbF levels correlate with greater benefit for individuals with blood disease, such as reduction in disease symptoms and improved overall health. A T to C mutation at the −198 position in the HBG promoter causes HPFH by interference of binding to γ-globulin repressor proteins, such as BCL11A.

[0156] Ex vivo manipulation and/or editing of HSCs prior to administration to patients as a cell therapy is a promising approach for the treatment of hematological disorders. ABEs can introduce a T to C substitution at the −198 position of the promoter region of HBG1/2 (Gaudelli, N. M. et al. Programmable base editing of A*T to G*C in genomic DNA without DNA cleavage. Nature 551, 464-471, doi:10.1038/nature24644 (2017)). This naturally occurring allele yields Hereditary Persistence of Fetal Hemoglobin (HPFH) resulting in increased levels of γ-globin into adulthood, which can mitigate the defects in β-globin seen in sickle cell disease and β-thalassemia (Wienert, B. et al. KLF1 drives the expression of fetal hemoglobin in British HPFH. Blood 130, 803-807, doi:10.1182/blood-2017-02-767400 (2017)). Base editor systems have been developed that significantly increase the level of HbF following nucleotide conversion at key regulatory motifs within the HBG1 and HBG2 (HBGT1/2) promoters.

[0157] Increasing levels of HbF expression leads to protection to the majority of SCD and ß-thalassemia patients based on clinical observations of HPFH and non-interventional therapy that links higher HbF dosage with milder disease (Ngo et al., 2011 Brit J Hem, Vol. 156(2):259-264; Musallam et al., 2012 Blood). Accordingly, in the HPFH approach described here, base editing is used to recreate single base changes in the regulatory region of both gamma globin genes (HBG1 and HBG2) that disrupt repressor binding and lead to increased expression of fetal hemoglobin (HbF). Beta-thalassemia or sickle cell disease patients naturally harboring these variants are often asymptomatic or experience a milder form of the disease.

[0158] An exemplary target sequence for introducing an alteration to an HBG1/2 promoter to increase expression of fetal hemoglobin is provided below:

### The Target Sequence, Including Edited Bases 5 and 8 (in Bold) and PAM (SEQ ID NO: 440):

| 1 | 2 | 3 | 4 | 5 | 6 | 7 | 8 | 9 | 10 | 11 | 12 | 13 | 14 | 15 | 16 | 17 | 18 | 19 | 20 | PAM |
|---|---|---|---|---|---|---|---|---|---|---|---|---|---|---|---|---|---|---|---|---|
| C | T | T | G | A | C | C | A | A | T | A | G | C | C | T | T | G | A | C | A | AGG |

### Editing of Target Genes

[0159] To produce the gene edits described above, cells (e.g., hematopoietic stem cells (HSCs)) are contacted with one or more guide RNAs and a nucleobase editor polypeptide comprising a nucleic acid programmable DNA binding protein (napDNAbp) and an adenosine deaminase. In some cases, the cells are collected from a subject prior to the contacting. In some embodiments, the gRNA comprises nucleotide analogs. These nucleotide analogs can inhibit degradation of the gRNA from cellular processes. Tables 1A, 1B, and 2 provides exemplary spacer sequences to be used for gRNAs. In some instances, a spacer sequence can be selected from those listed in Tables 1A, 1B, and 2 or from a variant thereof with a truncation and/or extension (e.g., a 1, 2, 3, 4, 5, 6, 7, 8, 9, or 10 nucleotide 3′ and/or 5′ truncation and/or extension). In some instances, the gRNA is added directly to a cell.

[0160] Base editing can be carried out in vitro or in vivo. In some embodiments, cells (e.g., a hematopoietic stem cells (HSCs)) are collected from a subject or a donor. In some embodiments, base editing is carried out to induce changes in the genome of the cell. In some embodiments, base editing is carried out to induce changes in the genome of an allogeneic cell.

[0161] In some embodiments, cells of the present disclosure, are contacted with one or more guide RNAs and a nucleobase editor polypeptide comprising a nucleic acid programmable DNA binding protein (napDNAbp) (e.g., Cas9) domain and an adenosine deaminase domain. In some embodiments, the at least one nucleic acid molecule encoding one or more guide RNAs and a nucleobase editor polypeptide is delivered to cells by one or more vectors (e.g., AAV vector or lipid nanoparticle). In some cases, a guide RNA(s) and a nucleobase editor polypeptide is delivered to cells by electroporation.

[0162] The present disclosure provides one or more guide RNAs that direct a nucleobase editor polypeptide to edit a site in the genome of the cell (e.g., hematopoietic stem cell (HSC)). In some embodiments, the present disclosure provides guide RNAs that target a CD117 polynucleotide, a beta globin (HBB) polynucleotide, and/or a promoter region of a HBG1/2 polynucleotide. Exemplary guide RNA spacer sequences are provided in the below Tables 1A, 1B, and 2.

[0163] In various instances, it is advantageous for a spacer sequence to include a 5′ and/or a 3′ “G” nucleotide. In some cases, for example, any spacer sequence or guide polynucleotide provided herein comprises or further comprises a 5′ “G”, where, in some embodiments, the 5′ “G” is or is not complementary to a target sequence. In some embodiments, the 5′ “G” is added to a spacer sequence that does not already contain a 5′ “G.” For example, it can be advantageous for a guide RNA to include a 5′ terminal “G” when the guide RNA is expressed under the control of a U6 promoter or the like because the U6 promoter prefers a “G” at the transcription start site (see Cong, L. et al. “Multiplex genome engineering using CRISPR/Cas systems. Science 339:819-823 (2013) doi: 10.1126/science.1231143). In some cases, a 5′ terminal “G” is added to a guide polynucleotide that is to be expressed under the control of a promoter but is optionally not added to the guide polynucleotide if or when the guide polynucleotide is not expressed under the control of a promoter.

[0164] In an embodiment, an end-modified guide polynucleotide contains the following nucleotide sequence:

(SEQ ID NO: 441)
mUsmUsmCsUCCACAGGAGUCAGGUGGUUUUAGAGCUAGAAAUAGCAAG
UUAAAAUAAGGCUAGUCCGUUAUCAACUUGAAAAAGUGGCACCGAGUCG
GUGCmUsmUsmUsU.

[0165] In another embodiment, a heavy mod guide polynucleotide contains the following nucleotide sequence (gRNA2861):

mUsmUsmCsUCCACAGGAGUCAGGUGGUUUUAGAmGmCmCmGmGmCmGm
GmAmAmAmCmGmCmCmGmGmCAAGUUAAAAUAAGGCUAGUCCGUUAmUm
CAAmCmUmUGGACUUCGGUCCmAmAmGUGGmCmAmCmCmGmAmGmUmCm
GmGmUmGmCmUsmUsmUsmU (SEQ ID NO: 442;
containing GOLD, LONGEST mods).

[0166] In some embodiments, a guide polynucleotide contains one of the following nucleotide sequences:

mNsmNsmNsNNNNNNNNNNNNNNNNNGUUUUAGAGCUAGAAAUAGCAAG
UUAAAAUAAGGCUAGUCCGUUAUCAACUUGAAAAAGUGGCACCGAGUCG
GUGCmUsmUsmUsU (SEQ ID NO: 443; end-modified
guide);
or
mNsmNsmNsNNNNNNNNNNNNNNNNNGUUUUAGAmGmCmCmGmGmCmGm
GmAmAmAmCmGmCmCmGmGmCAAGUUAAAAUAAGGCUAGUCCGUUAmUm
CAAmCmUmUGGACUUCGGUCCmAmAmGUGGmCmAmCmCmGmAmGmUmCm
GmGmUmGmCmUsmUsmUsmU (SEQ ID NO: 444; heavy
mod guide; containing GOLD, LONGEST mods).

[0167] Throughout the disclosure, the following notation is used to indicate chemical modifications to a guide polynucleotide: “N” represents any nucleotide, “mN” indicates a 2′-OMe modification of the nucleotide “N”, and “Ns” indicates that the nucleotide “N” is linked to the following nucleotide by a phosphorothioate (PS).

[0168] In various embodiments, a base editor system of the disclosure contains a guide polynucleotide of the disclosure (e.g., one of the above-listed guide polynucleotides) and the base editor ABE9v1 or ABE9v2.

TABLE 1A
Exemplary spacer sequences for editing HBB

| | | | | | SEQ | |
|---|---|---|---|---|---|---|
| Guide | | Description | Base | gRNA Spacer | ID | |
| Name | Gene | of Edit | Editor | Sequence | NO | PAM |
| | HBB | Makassar | ABE | UUCUCCACAGGAGUCAG | 445 | |
| | | | | GUG | | |
| sgRNA_ | HBB | Makassar | ABE | ACUUCUCCACAGGAGUC | 446 | TGC |
| 017, | | | | AGG | | |
| sgRNA_ | | | | | | |
| 027 | | | | | | |
| (TSBT | | | | | | |
| x853) | | | | | | |
| | HBB | Makassar | ABE | GACUUCUCCACAGGAGU | 447 | TGC |
| | | | | CAGG | | |
| | HBB | Makassar | ABE | CUUCUCCACAGGAGUCA | 448 | TGC |
| | | | | GG | | |
| | HBB | Makassar | ABE | CUUCUCCACAGGAGUCA | 449 | |
| | | | | GAU | | |
| | HBB | Makassar | ABE | ACUUCUCCACAGGAGUC | 450 | |
| | | | | AGAU | | |
| | HBB | Makassar | ABE | GACUUCUCCACAGGAGU | 451 | |
| | | | | CAGAU | | |
| | HBB | Makassar | ABE | UCUGACUCCUGUGGAGA | 452 | GCA |
| | | | | AGUCU | | |
| | HBB | Makassar | ABE | AGACUUCUCCACAGGAG | 453 | TBC |
| | | | | UCAGA | | |
| | HBB | Makassar | ABE | UCCACAGGAGUCAGAUG | 454 | NNNRRT |
| | | | | CAC | | (CATGGT) |

TABLE 1B
Exemplary spacer sequences for editing a promoter region of HBG1/2

| | | | | gRNA Spacer | SEQ | |
|---|---|---|---|---|---|---|
| Guide | | Description | | Sequence | ID | |
| Name | Gene | of Edit | Base Editor | | NO | PAM |
| | HBG1/2 | c.−198 T > C | ABE | GUGGGGAAGGGGCCCC | 455 | AGG |
| | | | | CAAG | | |
| | HBG1/2 | c.−198 T > C | ABE | AUUGAGAUAGUGUGGG | 456 | GGG |
| | | | | GAAG | | |
| | HBG1/2 | c.−198 T > C | ABE | CAUUGAGAUAGUGUGG | 457 | GGG |
| | | | | GGAA | | |
| | HBG1/2 | c.−198 T > C | ABE | GCAUUGAGAUAGUGUG | 458 | AGG |
| | | | | GGGA | | |
| | HBG1/2 | c.−198 T > C | ABE | GUGGGGAAGGGGCCCC | 455 | AGG |
| | | | | CAAG | | |
| | HBG1/2 | c.−114~- | CBE and/or | GCUAUUGGUCAAGGCA | 459 | TGG |
| | | 102 deletion | ABE | AGGC | | |
| | HBG1/2 | c.−114~- | CBE and/or | CAAGGCUAUUGGUCAA | 460 | AGG |
| | | 102 deletion | ABE | GGCA | | |
| | HBG1/2 | c.−114~- | CBE and/or | CUUGUCAAGGCUAUUG | 461 | AGG |
| | | 102 deletion | ABE | GUCA | | |
| sgRNA_ | HBG1/2 | c.−114~- | CBE and/or | CUUGACCAAUAGCCUU | 462 | AGG |
| 015 | | 102 deletion | ABE | GACA | | |
| (TSBT | | | | | | |
| x045) | | | | | | |
| | HBG1/2 | c.−114~- | CBE and/or | GUUUGCCUUGUCAAGG | 463 | TGG |
| | | 102 deletion | ABE | CUAU | | |
| | HBG1/2 | c.−114~- | CBE and/or | UGGUCAAGUUUGCCUU | 464 | AGG |
| | | 102 deletion | ABE | GUCA | | |
| | HBG1/2 | c.−198 T > C | ABE | UGGGGAAGGGGCCCCC | 465 | GGA |
| | | | | AAGA | | |
| | HBG1/2 | c.−198 T > C | ABE | GUGUGGGGAAGGGGCC | 466 | AGA |
| | | | | CCCA | | |
| | HBG1/2 | c.−175 T > C | ABE | UCAGACAGAUAUUUGC | 467 | AGA |
| | | | | AUUG | | |
| | HBG1/2 | c.−175 T>C | ABE | UUUCAGACAGAUAUUU | 468 | TGA |
| | | | | GCAU | | |
| | HBG1/2 | c.−114~- | CBE and/or | CUUGCCUUGACCAAUA | 469 | TGA |
| | | 102 deletion | ABE | GCCU | | |
| | HBG1/2 | c.−114~- | CBE and/or | UAGCCUUGACAAGGCA | 470 | TGA |
| | | 102 deletion | ABE | AACU | | |
| | HBG1/2 | c.−90 | CBE and/or | CAAACUUGACCAAUAG | 471 | AGA |
| | | BCL11A | ABE | UCUU | | |
| | | binding | | | | |
| | HBG1/2 | c.−198 T > C | ABE | UGUGGGGAAGGGGCCC | 472 | GAGGA |
| | | | | CCAA | | T |
| | HBG1/2 | c.−202 | CBE and/or | GGGCCCCUUCCCCACA | 473 | CTCAA |
| | | C > T, −201 | ABE | CUAU | | T |
| | | C > T, −198 | | | | |
| | | T > C, −197 | | | | |
| | | C > T, −196 | | | | |
| | | C > T, −195 | | | | |
| | | C > G | | | | |
| | HBG1/2 | c.−175 T > C | ABE | CAGACAGAUAUUUGCA | 474 | GATAG |
| | | | | UUGA | | T |
| | HBG1/2 | c.−175 T > C | ABE | UUUCAGACAGAUAUUU | 468 | TGAGA |
| | | | | GCAU | | T |
| | HBG1/2 | c.−114~- | CBE and/or | GCCUUGACAAGGCAAA | 475 | ACCAA |
| | | 102 deletion | ABE | CUUG | | T |
| | HBG1/2 | c.−114~- | CBE and/or | UUGACAAGGCAAACUU | 476 | AATAG |
| | | 102 deletion | ABE | GACC | | T |
| | HBG1/2 | c.−90 | CBE and/or | UGACCAAUAGUCUUAG | 477 | TCCAG |
| | | BCL11A | ABE | AGUA | | T |
| | | binding | | | | |
| | HBG1/2 | c.−175 T > C | ABE | AGACAGAUAUUUGCAU | 478 | TTT |
| | | | | UGAGAUA | | |
| | HBG1/2 | | ABE and/or | AAGUUUGCCUUGUCAA | 479 | NNNRRT |
| | | | CBE | GGCU | | (AUUGGU) |

TABLE 2
Exemplary spacer sequences for editing a CD117 polypeptide

| | | SEQ | | SEQ | | |
|---|---|---|---|---|---|---|
| | | ID | | ID | | |
| Guide No. | Spacer | NO: | Target Sequence | NO: | PAM | Mutations |
| Guide-CC1 | AUGAAACGAAUG | 533 | ATGAAACGAATGAGA | 732 | CAG | E73G |
| | AGAAUAAG | | ATAAG | | | T74A |
| | | | | | | N75D |
| Guide-CC2 | UGGAUGAAACGA | 534 | TGGATGAAACGAATG | 733 | AAG | D72G |
| | AUGAGAAU | | AGAAT | | | E73G |
| | | | | | | T74A |
| Guide-CC3 | GCCAGGGGAAGC | 535 | GCCAGGGGAAGCCTC | 734 | AAG | Q152R |
| | CUCUUCCC | | TTCCC | | | K154E |
| Guide-CC4 | UCUGUGUACUCA | 536 | TCTGTGTACTCAACG | 735 | AAG | Y243C |
| | ACGUGGAA | | TGGAA | | | |
| Guide-CC5 | UGUGUACUCAAC | 537 | TGTGTACTCAACGTG | 736 | GAG | Y243C |
| | GUGGAAAA | | GAAAA | | | |
| Guide-CC6 | GGGAAGAUUAUC | 538 | GGGAAGATTATCCCA | 737 | GAG | E360G |
| | CCAAGUCU | | AGTCT | | | D361G |
| Guide-CC7 | CCAGAAAUCCUG | 539 | CCAGAAATCCTGACT | 738 | CAG | E414G |
| | ACUUACGA | | TACGA | | | I415V |
| Guide-CC8 | UCUGAGAAUGAA | 540 | TCTGAGAATGAAAGT | 739 | CAG | E366G |
| | AGUAAUAU | | AATAT | | | N367G |
| Guide-CC9 | CUAUUUUAACUU | 541 | CTATTTTAACTTTGC | 740 | AAG | Y503C |
| | UGCAUUUA | | ATTTA | | | N505G |
| Guide- | UUCACGAGCCUG | 542 | TTCACGAGCCTGTCG | 741 | CAG | L421P |
| CC10 | UCGUAAGU | | TAAGT | | | V422A |
| Guide- | CAGCAGUGGAUC | 543 | CAGCAGTGGATCTAT | 742 | CAG | Q347R |
| CC11 | UAUAUGAA | | ATGAA | | | |
| Guide- | CAUUCCCCAAAC | 544 | CATTCCCCAAACCTG | 743 | CAG | K342E |
| CC12 | CUGAACAC | | AACAC | | | |
| Guide- | UAUCCCAAGUCU | 545 | TATCCCAAGTCTGAG | 744 | AAG | K364G |
| CC13 | GAGAAUGA | | AATGA | | | |
| Guide- | AUAAAUGGGAAG | 546 | ATAAATGGGAAGATT | 745 | AAG | K358G |
| CC14 | AUUAUCCC | | ATCCC | | | |
| Guide- | UCCCCAAACCUG | 547 | TCCCCAAACCTGAAC | 746 | CAG | K342G |
| CC15 | AACACCAG | | ACCAG | | | |
| Guide- | GCCAUUCACGAG | 548 | GCCATTCACGAGCCT | 747 | AAG | V422A |
| CC16 | CCUGUCGU | | GTCGT | | | |
| Guide- | AAAUGUCACAAC | 549 | AAATGTCACAACAAC | 748 | AAG | N300S |
| CC17 | AACCUUGG | | CTTGG | | | T302A |
| Guide- | CGUGGAAAAGAG | 550 | CGTGGAAAAGAGAAA | 749 | CAG | K247G |
| CC18 | AAAACAGU | | ACAGT | | | R248G |
| Guide- | CCAUUUGACAAA | 551 | CCATTTGACAAAGCC | 750 | CAG | V64A |
| CC19 | GCCCGGAU | | CGGAT | | | W66R |
| Guide- | AGCAAGCUAUCU | 552 | AGCAAGCTATCTTCT | 751 | AAG | S220G |
| CC20 | UCUUAGGG | | TAGGG | | | Y221C |
| Guide- | UGAGGUUUAUUC | 553 | TGAGGTTTATTCCTG | 752 | AAG | R161G |
| CC21 | CUGACCCC | | ACCCC | | | I163V |
| Guide- | UGAAUGGAUCAC | 554 | TGAATGGATCACGGA | 753 | CAG | E81G |
| CC22 | GGAAAAGG | | AAAGG | | | I83V |
| Guide- | CCACUGGCAGUA | 555 | CCACTGGCAGTACAG | 754 | GAG | L455P |
| CC23 | CAGAAGCA | | AAGCA | | | V457A |
| Guide- | AGAAUGAAUGGA | 556 | AGAATGAATGGATCA | 755 | AAG | N80G |
| CC24 | UCACGGAA | | CGGAA | | | E81G |
| Guide- | UGUAAACGAUGG | 557 | TGTAAACGATGGAGA | 756 | TAG | N326G |
| CC25 | AGAAAAUG | | AAATG | | | D327G |
| Guide- | AGGCUUACAACG | 558 | AGGCTTACAACGATG | 757 | AAG | Y494C |
| CC26 | AUGUGGGC | | TGGGC | | | N495D |
| Guide- | AAGUGACCAAUU | 559 | AAGTGACCAATTATT | 758 | AAG | T144A |
| CC27 | AUUCCCUC | | CCCTC | | | N145D |
| Guide- | UGUCACAACAAC | 560 | TGTCACAACAACCTT | 759 | TAG | T302A |
| CC28 | CUUGGAAG | | GGAAG | | | T303A |
| Guide- | AAUAGAUUGGUA | 561 | AATAGATTGGTATTT | 760 | CAG | I438M |
| CC29 | UUUUUGUC | | TTGTC | | | D439G |
| Guide- | ACAAUGGCACGG | 562 | ACAATGGCACGGTTG | 761 | AAG | N486G |
| CC30 | UUGAAUGU | | AATGT | | | T488A |
| Guide- | ACACAACAGGCA | 563 | ACACAACAGGCACAG | 762 | AAG | V213A |
| CC31 | CAGCUUUG | | CTTTG | | | V214A |
| Guide- | GUUCAGAGUUCU | 564 | GTTCAGAGTTCTATA | 763 | TAG | Q475R |
| CC32 | AUAGAUUC | | GATTC | | | S476G |
| Guide- | AGAUUUGAUUGU | 565 | AGATTTGATTGTTGA | 764 | AAG | D332G |
| CC33 | UGAAUAUG | | ATATG | | | I334V |
| Guide- | AUAAACAUUAAA | 566 | ATAAACATTAAATGC | 765 | CAG | V407A |
| CC34 | UGCUAUGG | | TATGG | | | Y408H |
| Guide- | AUCCAUCCAUCC | 567 | ATCCATCCATCCAGG | 766 | CAG | I39V |
| CC35 | AGGAAAAU | | AAAAT | | | H40R |
| Guide- | AUGGAUCACGGA | 568 | ATGGATCACGGAAAA | 767 | AAG | I83V |
| CC36 | AAAGGCAG | | GGCAG | | | T84A |
| Guide- | GUUGACUAUCAG | 569 | GTTGACTATCAGTTC | 768 | GAG | T276A |
| CC37 | UUCAGCGA | | AGCGA | | | I277V |
| Guide- | CACAACAACCUU | 570 | CACAACAACCTTGGA | 769 | TAG | T303A |
| CC38 | GGAAGUAG | | AGTAG | | | T304A |
| Guide- | CUAUAGAUUCUA | 571 | CTATAGATTCTAGTG | 770 | AAG | I478V |
| CC39 | GUGCAUUC | | CATTC | | | D479G |
| Guide- | UGCCAAUAAUAC | 572 | TGCCAATAATACTTT | 771 | CAG | N293G |
| CC40 | UUUUGGAU | | TGGAT | | | N294G |
| Guide- | GCUUUGUCAAAU | 573 | GCTTTGTCAAATGGA | 772 | GAG | K65E |
| CC41 | GGACUUUU | | CTTTT | | | |
| Guide- | CUUCCCCAUGAU | 574 | CTTCCCCATGATAAA | 773 | CAG | M318V |
| CC42 | AAACACUA | | CACTA | | | |
| Guide- | CGUUUGGAAAGC | 575 | CGTTTGGAAAGCTAG | 774 | CAG | K471E |
| CC43 | UAGUGGUU | | TGGTT | | | |
| Guide- | AAACUACAGGAG | 576 | AAACTACAGGAGAAA | 775 | TAG | Q256R |
| CC44 | AAAUAUAA | | TATAA | | | |
| Guide- | AGGAGGCACUUA | 577 | AGGAGGCACTTACAC | 776 | TAG | T389A |
| CC45 | CACAUUCC | | ATTCC | | | |
| Guide- | CUUGAAUGCACU | 578 | CTTGAATGCACTAGA | 777 | TAG | F483P |
| CC46 | AGAAUCUA | | ATCTA | | | |
| Guide- | UUCCAAACGGUG | 579 | TTCCAAACGGTGGCC | 778 | GAG | F469P |
| CC47 | GCCCAGAU | | CAGAT | | | |
| Guide- | UCCAGGAAAAUC | 580 | TCCAGGAAAATCAGA | 779 | TAG | K43G |
| CC48 | AGACUUAA | | CTTAA | | | |
| Guide- | CCCUCAAGGGGU | 581 | CCCTCAAGGGGTGCC | 780 | AAG | K149G |
| CC49 | GCCAGGGG | | AGGGG | | | |
| Guide- | UCCAAAGCAAGC | 582 | TCCAAAGCAAGCTAT | 781 | TAG | K218G |
| CC50 | UAUCUUCU | | CTTCT | | | |
| Guide- | UAGGGAAGGGGA | 583 | TAGGGAAGGGGAAGA | 782 | CAG | E225G |
| CC51 | AGAAUUCA | | ATTCA | | | |
| Guide- | AGCGAGAGUUAA | 584 | AGCGAGAGTTAATGA | 783 | GAG | R281G |
| CC52 | UGAUUCUG | | TTCTG | | | |
| Guide- | UUUGGAAAGCUA | 585 | TTTGGAAAGCTAGTG | 784 | GAG | K471G |
| CC53 | GUGGUUCA | | GTTCA | | | |
| Guide- | AGACGGUUCCCC | 586 | AGACGGTTCCCCTGG | 785 | CAG | S35P |
| CC54 | UGGACUCA | | ACTCA | | | |
| Guide- | ACGUUGACUAUC | 587 | ACGTTGACTATCAGT | 786 | GAG | T276A |
| CC55 | AGUUCAGC | | TCAGC | | | |
| Guide- | CUGCACAUCCAC | 588 | CTGCACATCCACTGG | 787 | CAG | V459A |
| CC56 | UGGCAGUA | | CAGTA | | | |
| Guide- | CACAUCCACUGG | 589 | CACATCCACTGGCAG | 788 | AAG | V457A |
| CC57 | CAGUACAG | | TACAG | | | |
| Guide- | AUCCACUGGCAG | 590 | ATCCACTGGCAGTAC | 789 | CAG | V457A |
| CC58 | UACAGAAG | | AGAAG | | | |
| Guide- | UUGACGUCAGAA | 591 | TTGACGTCAGAATTG | 790 | TAG | V399A |
| CC59 | UUGGACAC | | GACAC | | | |
| Guide- | AUUAACUCUCGC | 592 | ATTAACTCTCGCTGA | 791 | TAG | V282A |
| CC60 | UGAACUGA | | ACTGA | | | |
| Guide- | CCAUACAAGGAG | 593 | CCATACAAGGAGCGG | 792 | AAG | L124P |
| CC61 | CGGUCAAC | | TCAAC | | | Y125H |
| Guide- | UUCAGGAUGAAU | 594 | TTCAGGATGAATTTT | 793 | CAG | I201T |
| CC62 | UUUUCCGA | | TCCGA | | | L202P |
| Guide- | GUGACUUCAAUU | 595 | GTGACTTCAATTATG | 794 | CAG | D266G |
| CC63 | AUGAACGU | | AACGT | | | N268D |
| Guide- | GUCGGAAAAAUU | 596 | GTCGGAAAAATTCAT | 795 | AAG | E198G |
| CC64 | CAUCCUGA | | CCTGA | | | K199G |
| Guide- | AUUAUAUUUCUC | 597 | ATTATATTTCTCCTG | 796 | TAG | Y259H |
| CC65 | CUGUAGUU | | TAGTT | | | |
| Guide- | AAGGAGCGGUCA | 598 | AAGGAGCGGTCAACA | 797 | AAG | S123P |
| CC66 | ACAAGGAA | | AGGAA | | | |
| Guide- | GAGAUUAAAAGG | 599 | GAGATTAAAAGGCAC | 798 | GAG | K383G |
| CC67 | CACCGAAG | | CGAAG | | | |
| Guide- | AACGAGAUUAAA | 600 | AACGAGATTAAAAGG | 799 | AAG | R381G |
| CC68 | AGGCACCG | | CACCG | | | |
| Guide- | GAAAAAUUCAUC | 601 | GAAAAATTCATCCTG | 800 | GAG | K199G |
| CC69 | CUGAAAGU | | AAAGT | | | |
| Guide- | AUUCAUCCUGAA | 602 | ATTCATCCTGAAAGT | 801 | CAG | I201V |
| CC70 | AGUGAGGC | | GAGGC | | | |
| Guide- | GAAAGAAGACAA | 603 | GAAAGAAGACAACGA | 802 | TGG | K127R |
| CC71 | CGACACGC | | CACGC | | | E128G |
| | | | | | | D129G |
| Guide- | UACAGGAGAAAU | 604 | TACAGGAGAAATATA | 803 | TGG | Q256R |
| CC72 | AUAAUAGC | | ATAGC | | | E257G |
| | | | | | | K258E |
| Guide- | AUGAGAAUAAGC | 605 | ATGAGAATAAGCAGA | 804 | TGG | E76G |
| CC73 | AGAAUGAA | | ATGAA | | | N77G |
| | | | | | | K78E |
| Guide- | CCAGGGGAAGCC | 606 | CCAGGGGAAGCCTCT | 805 | AGG | Q152R |
| CC74 | UCUUCCCA | | TCCCA | | | K154G |
| Guide- | CAGAAAUCCUGA | 607 | CAGAAATCCTGACTT | 806 | AGG | E414G |
| CC75 | CUUACGAC | | ACGAC | | | I415V |
| Guide- | ACAGAACCUUCA | 608 | ACAGAACCTTCACTG | 807 | TGG | R353G |
| CC76 | CUGAUAAA | | ATAAA | | | T354A |
| Guide- | UCACGAGCCUGU | 609 | TCACGAGCCTGTCGT | 808 | AGG | L421P |
| CC77 | CGUAAGUC | | AAGTC | | | V422A |
| Guide- | ACUUACGACAGG | 610 | ACTTACGACAGGCTC | 809 | TGG | Y418C |
| CC78 | CUCGUGAA | | GTGAA | | | D419G |
| Guide- | UGUUCAUAUAGA | 611 | TGTTCATATAGATCC | 810 | TGG | M351T |
| CC79 | UCCACUGC | | ACTGC | | | |
| Guide- | CCAAACCUGAAC | 612 | CCAAACCTGAACACC | 811 | TGG | K342G |
| CC80 | ACCAGCAG | | AGCAG | | | |
| Guide- | CUGUCGUAAGUC | 613 | CTGTCGTAAGTCAGG | 812 | TGG | Y418H |
| CC81 | AGGAUUUC | | ATTTC | | | |
| Guide- | CAGAACCUUCAC | 614 | CAGAACCTTCACTGA | 813 | GGG | T354A |
| CC82 | UGAUAAAU | | TAAAT | | | |
| Guide- | UAUUUUAACUUU | 615 | TATTTTAACTTTGCA | 814 | AGG | N505G |
| CC83 | GCAUUUAA | | TTTAA | | | |
| Guide- | UAAGCAGAAUGA | 616 | TAAGCAGAATGAATG | 815 | CGG | K78R |
| CC84 | AUGGAUCA | | GATCA | | | Q79R |
| | | | | | | N80D |
| Guide- | GAAUGGCAUGCU | 617 | GAATGGCATGCTCCA | 816 | TGG | N423S |
| CC85 | CCAAUGUG | | ATGTG | | | M425V |
| Guide- | GUGCAGACACUA | 618 | GTGCAGACACTAAAC | 817 | TGG | Q460R |
| CC86 | AACUCAUC | | TCATC | | | T461A |
| Guide- | UGACCAAUUAUU | 619 | TGACCAATTATTCCC | 818 | GGG | T144A |
| CC87 | CCCUCAAG | | TCAAG | | | N145G |
| Guide- | GUGACCAAUUAU | 620 | GTGACCAATTATTCC | 819 | GGG | T144A |
| CC88 | UCCCUCAA | | CTCAA | | | N145G |
| Guide- | AGUGACCAAUUA | 621 | AGTGACCAATTATTC | 820 | AGG | T144A |
| CC89 | UUCCCUCA | | CCTCA | | | N145G |
| Guide- | GAAUGAAUGGAU | 622 | GAATGAATGGATCAC | 821 | AGG | N80S |
| CC90 | CACGGAAA | | GGAAA | | | E81G |
| Guide- | UGCAGACACUAA | 623 | TGCAGACACTAAACT | 822 | GGG | Q460R |
| CC91 | ACUCAUCU | | CATCT | | | T461A |
| Guide- | CCAAAGCAAGCU | 624 | CCAAAGCAAGCTATC | 823 | AGG | K218G |
| CC92 | AUCUUCUU | | TTCTT | | | S220G |
| Guide- | ACAGCACUGACU | 625 | ACAGCACTGACTTGC | 824 | TGG | V195A |
| CC93 | UGCCCUCC | | CCTCC | | | L196P |
| Guide- | GGAGGGCAAGUC | 626 | GGAGGGCAAGTCAGT | 825 | CGG | E191G |
| CC94 | AGUGCUGU | | GCTGT | | | K193G |
| Guide- | CACAUAAACAUU | 627 | CACATAAACATTAAA | 826 | TGG | V407A |
| CC95 | AAAUGCUA | | TGCTA | | | Y408H |
| Guide- | CAAAUGGACUUU | 628 | CAAATGGACTTTTGA | 827 | TGG | K65R |
| CC96 | UGAGAUCC | | GATCC | | | T67A |
| Guide- | CAAUGGCACGGU | 629 | CAATGGCACGGTTGA | 828 | AGG | N486S |
| CC97 | UGAAUGUA | | ATGTA | | | T488A |
| Guide- | AAAUACUGUAGU | 630 | AAATACTGTAGTGTT | 829 | TGG | V323A |
| CC98 | GUUUAUCA | | TATCA | | | F324L |
| Guide- | CAAAGCAAGCUA | 631 | CAAAGCAAGCTATCT | 830 | GGG | K218R |
| CC99 | UCUUCUUA | | TCTTA | | | S220G |
| Guide- | GGAAUAAACCUC | 632 | GGAATAAACCTCAAG | 831 | GGG | F162P |
| CC100 | AAGUCCUU | | TCCTT | | | I163T |
| Guide- | ACCACUAGCUUU | 633 | ACCACTAGCTTTCCA | 832 | TGG | L472P |
| CC101 | CCAAACGG | | AACGG | | | V473A |
| Guide- | GCAAGCUAUCUU | 634 | GCAAGCTATCTTCTT | 833 | AGG | S220G |
| CC102 | CUUAGGGA | | AGGGA | | | Y221C |
| Guide- | CAAGCUAUCUUC | 635 | CAAGCTATCTTCTTA | 834 | GGG | S220G |
| CC103 | UUAGGGAA | | GGGAA | | | Y221C |
| Guide- | UUUGAUCAUGAU | 636 | TTTGATCATGATGCC | 835 | TGG | M171T |
| CC104 | GCCCGCCU | | CGCCT | | | I172T |
| Guide- | UUGAUCAUGAUG | 637 | TTGATCATGATGCCC | 836 | GGG | M171T |
| CC105 | CCCGCCUU | | GCCTT | | | I172T |
| Guide- | AUAGAUUGGUAU | 638 | ATAGATTGGTATTTT | 837 | AGG | I438M |
| CC106 | UUUUGUCC | | TGTCC | | | D439G |
| Guide- | AGGAAUAAACCU | 639 | AGGAATAAACCTCAA | 838 | TGG | F162P |
| CC107 | CAAGUCCU | | GTCCT | | | I163T |
| Guide- | CACAACAGGCAC | 640 | CACAACAGGCACAGC | 839 | AGG | V213A |
| CC108 | AGCUUUGA | | TTTGA | | | |
| Guide- | UGACGUCAGAAU | 641 | TGACGTCAGAATTGG | 840 | AGG | V399A |
| CC109 | UGGACACU | | ACACT | | | |
| Guide- | ACUACAGUAUUU | 642 | ACTACAGTATTTGTA | 841 | TGG | T322A |
| CC110 | GUAAACGA | | AACGA | | | |
| Guide- | AGCAAAUGUCAC | 643 | AGCAAATGTCACAAC | 842 | TGG | N300G |
| CC111 | AACAACCU | | AACCT | | | |
| Guide- | GUCUGAUUUUCC | 644 | GTCTGATTTTCCTGG | 843 | TGG | S44P |
| CC112 | UGGAUGGA | | ATGGA | | | |
| Guide- | UGCUGAUCCAAA | 645 | TGCTGATCCAAAAGT | 844 | TGG | S298P |
| CC113 | AGUAUUAU | | ATTAT | | | |
| Guide- | AUCAGACUUAAU | 646 | ATCAGACTTAATAGT | 845 | TGG | D45G |
| CC114 | AGUCCGCG | | CCGCG | | | |
| Guide- | UGCAUUCAAGCA | 647 | TGCATTCAAGCACAA | 846 | CGG | K484G |
| CC115 | CAAUGGCA | | TGGCA | | | |
| Guide- | UCCCAGAGCCCA | 648 | TCCCAGAGCCCACAA | 847 | TGG | E435G |
| CC116 | CAAUAGAU | | TAGAT | | | |
| Guide- | UCAGCGAGAGUU | 649 | TCAGCGAGAGTTAAT | 848 | TGG | R281G |
| CC117 | AAUGAUUC | | GATTC | | | |
| Guide- | GUGUGAAACGCG | 650 | GTGTGAAACGCGCCT | 849 | CGG | K176G |
| CC118 | CCUACCAU | | ACCAT | | | |
| Guide- | UCAGACUUAAUA | 651 | TCAGACTTAATAGTC | 850 | GGG | D45G |
| CC119 | GUCCGCGU | | CGCGT | | | |
| Guide- | UCUAGUGCAUUC | 652 | TCTAGTGCATTCAAG | 85 | TGG | S481G |
| CC120 | AAGCACAA | | CACAA | | | |
| Guide- | AUUCCCUCAAGG | 653 | ATTCCCTCAAGGGGT | 852 | GGG | K149E |
| CC121 | GGUGCCAG | | GCCAG | | | |
| Guide- | AAGGCAGAAGCC | 654 | AAGGCAGAAGCCACC | 853 | CGG | E88G |
| CC122 | ACCAACAC | | AACAC | | | |
| Guide- | GAGGUUUAUUCC | 655 | GAGGTTTATTCCTGA | 854 | AGG | I163V |
| CC123 | UGACCCCA | | CCCCA | | | |
| Guide- | UUUAUUCCUGAC | 656 | TTTATTCCTGACCCC | 855 | GGG | I163V |
| CC124 | CCCAAGGC | | AAGGC | | | |
| Guide- | GUUUAUUCCUGA | 657 | GTTTATTCCTGACCC | 856 | CGG | I163V |
| CC125 | CCCCAAGG | | CAAGG | | | |
| Guide- | CAUACAAGGAGC | 658 | CATACAAGGAGCGGT | 857 | AGG | L124P |
| CC126 | GGUCAACA | | CAACA | | | Y125H |
| Guide- | AAAAAUUCAUCC | 659 | AAAAATTCATCCTGA | 858 | AGG | K199G |
| CC127 | UGAAAGUG | | AAGTG | | | I201V |
| Guide- | AAAUAUAAUAGC | 660 | AAATATAATAGCTGG | 859 | CGG | Y259C |
| CC128 | UGGCAUCA | | CATCA | | | N260D/ |
| | | | | | | G/S |
| Guide- | UGACUUCAAUUA | 661 | TGACTTCAATTATGA | 860 | AGG | D266G |
| CC129 | UGAACGUC | | ACGTC | | | N268G |
| Guide- | CUAGUUCUGUGU | 662 | CTAGTTCTGTGTACT | 861 | TGG | S240G |
| CC130 | ACUCAACG | | CAACG | | | |
| Guide- | AGAUUAAAAGGC | 663 | AGATTAAAAGGCACC | 862 | AGG | K383G |
| CC131 | ACCGAAGG | | GAAGG | | | |
| Guide- | ACGAGAUUAAAA | 664 | ACGAGATTAAAAGGC | 863 | AGG | R381G |
| CC132 | GGCACCGA | | ACCGA | | | |
| Guide- | GGAUGAAACGAA | 665 | GGATGAAACGAATGA | 864 | AGC | E73G |
| CC133 | UGAGAAUA | | GAATA | | | T74A |
| | | | | | | N75G |
| Guide- | AACUACAGGAGA | 666 | AACTACAGGAGAAAT | 865 | AGC | Q256R |
| CC134 | AAUAUAAU | | ATAAT | | | E257G |
| | | | | | | K258G |
| Guide- | UGGGAAAGAAGA | 667 | TGGGAAAGAAGACAA | 866 | CGC | K127G |
| CC135 | CAACGACA | | CGACA | | | E128G |
| | | | | | | D129G |
| Guide- | GCCAAUAAUACU | 668 | GCCAATAATACTTTT | 867 | AGC | N293G |
| CC136 | UUUGGAUC | | GGATC | | | N294G |
| | | | | | | T295A |
| Guide- | CUUACGACAGGC | 669 | CTTACGACAGGCTCG | 868 | GGC | Y418C |
| CC137 | UCGUGAAU | | TGAAT | | | D419G |
| | | | | | | R420G |
| Guide- | GUUAAAAUAGGC | 670 | GTTAAAATAGGCAGA | 869 | TGC | Y503H |
| CC138 | AGAAGUCU | | AGTCT | | | F504P |
| Guide- | UUCUGUUCAUAU | 671 | TTCTGTTCATATAGA | 870 | TGC | Y350H |
| CC139 | AGAUCCAC | | TCCAC | | | M351T |
| Guide- | AGAAAUCCUGAC | 672 | AGAAATCCTGACTTA | 871 | GGC | I415V |
| CC140 | UUACGACA | | CGACA | | | T417A |
| Guide- | AACGAUGUGGGC | 673 | AACGATGTGGGCAAG | 872 | TGC | D496G |
| CC141 | AAGACUUC | | ACTTC | | | K499E |
| Guide- | AUUCCCCAAACC | 674 | ATTCCCCAAACCTGA | 873 | AGC | K342G |
| CC142 | UGAACACC | | ACACC | | | |
| Guide- | CGACAGGCUCGU | 675 | CGACAGGCTCGTGAA | 874 | TGC | R420G |
| CC143 | GAAUGGCA | | TGGCA | | | |
| Guide- | ACUUCUGCCUAU | 676 | ACTTCTGCCTATTTT | 875 | TGC | Y503C |
| CC144 | UUUAACUU | | AACTT | | | |
| Guide- | GCGACGAGAUUA | 677 | GCGACGAGATTAGGC | 876 | TGC | D52G |
| CC145 | GGCUGUUA | | TGTTA | | | E53G |
| | | | | | | I54V |
| | | | | | | R55G |
| Guide- | AAGACAACGACA | 678 | AAGACAACGACACGC | 877 | CGC | D129G |
| CC146 | CGCUGGUC | | TGGTC | | | N130G |
| | | | | | | D131G |
| | | | | | | T132A |
| Guide- | UGGAUCACGGAA | 679 | TGGATCACGGAAAAG | 878 | AGC | I83V |
| CC147 | AAGGCAGA | | GCAGA | | | T84A |
| | | | | | | E85G |
| | | | | | | K86E |
| Guide- | GACACAGACACA | 680 | GACACAGACACAACA | 879 | AGC | V213A |
| CC148 | ACAGGCAC | | GGCAC | | | V214A |
| | | | | | | S215P |
| | | | | | | V216A |
| Guide- | GGGAAGAAUUCA | 681 | GGGAAGAATTCACAG | 880 | TGC | E227G |
| CC149 | CAGUGACG | | TGACG | | | E228G |
| | | | | | | T230A |
| Guide- | GCACCAACAAAC | 682 | GCACCAACAAACACG | 881 | AGC | N99G |
| CC150 | ACGGCUUA | | GCTTA | | | K100G |
| | | | | | | H101R |
| Guide- | UAUAGAUUCUAG | 683 | TATAGATTCTAGTGC | 882 | AGC | I478M |
| CC151 | UGCAUUCA | | ATTCA | | | D479G |
| | | | | | | S481G |
| Guide- | UCAUGAUCAAAA | 684 | TCATGATCAAAAGTG | 883 | CGC | I172V |
| CC152 | GUGUGAAA | | TGAAA | | | K173G |
| | | | | | | S174G |
| Guide- | AUGAUCAAAAGU | 685 | ATGATCAAAAGTGTG | 884 | CGC | I172V |
| CC153 | GUGAAACG | | AAACG | | | K173G |
| | | | | | | S174G |
| Guide- | AAUGAAUGGAUC | 686 | AATGAATGGATCACG | 885 | GGC | E81G |
| CC154 | ACGGAAAA | | GAAAA | | | I83V |
| | | | | | | T84A |
| Guide- | CCAAUUAUUCCC | 687 | CCAATTATTCCCTCA | 886 | TGC | N145S |
| CC155 | UCAAGGGG | | AGGGG | | | Y146C |
| Guide- | CAGACUUAAUAG | 688 | CAGACTTAATAGTCC | 887 | GGC | D45G |
| CC156 | UCCGCGUG | | GCGTG | | | I47V |
| Guide- | UCUGACGUCAAU | 689 | TCTGACGTCAATGCT | 888 | AGC | D398G |
| CC157 | GCUGCCAU | | GCCAT | | | N400G |
| Guide- | GCAUAACAGCCU | 690 | GCATAACAGCCTAAT | 889 | CGC | L56P |
| CC158 | AAUCUCGU | | CTCGT | | | L57P |
| Guide- | UUUUUCCGACAG | 691 | TTTTTCCGACAGCAC | 890 | TGC | L196P |
| CC159 | CACUGACU | | TGACT | | | S197P |
| Guide- | UUUCCGUGAUCC | 692 | TTTCCGTGATCCATT | 891 | TGC | W82R |
| CC160 | AUUCAUUC | | CATTC | | | I83T |
| Guide- | UUUGACAAAGCC | 693 | TTTGACAAAGCCCGG | 892 | TGC | F63P |
| CC161 | CGGAUCAG | | ATCAG | | | V64A |
| Guide- | GCCCAGAUGAGU | 694 | GCCCAGATGAGTTTA | 893 | TGC | S464P |
| CC162 | UUAGUGUC | | GTGTC | | | S465P |
| Guide- | GCUGAACUGAUA | 695 | GCTGAACTGATAGTC | 894 | TGC | I277T |
| CC163 | GUCAACGU | | AACGT | | | S279P |
| Guide- | ACACUUUUGAUC | 696 | ACACTTTTGATCATG | 895 | CGC | M171T |
| CC164 | AUGAUGCC | | ATGCC | | | I172T |
| Guide- | GAAAAUCAGACU | 697 | GAAAATCAGACTTAA | 896 | CGC | K43R |
| CC165 | UAAUAGUC | | TAGTC | | | D45G |
| Guide- | GCAGACACUAAA | 698 | GCAGACACTAAACTC | 897 | GGC | T461A |
| CC166 | CUCAUCUG | | ATCTG | | | N463G |
| Guide- | GGACCAGGAGGG | 699 | GGACCAGGAGGGCAA | 898 | TGC | Q190R |
| CC167 | CAAGUCAG | | GTCAG | | | E191G |
| Guide- | GCUGAUCCAAAA | 700 | GCTGATCCAAAAGTA | 899 | GGC | F296P |
| CC168 | GUAUUAUU | | TTATT | | | S298P |
| Guide- | ACAUCCACUGGC | 701 | ACATCCACTGGCAGT | 900 | AGC | L455P |
| CC169 | AGUACAGA | | ACAGA | | | V457A |
| Guide- | CACUGGCAGUAC | 702 | CACTGGCAGTACAGA | 901 | AGC | V454A |
| CC170 | AGAAGCAG | | AGCAG | | | L455P |
| Guide- | AGGCAGAAGCCA | 703 | AGGCAGAAGCCACCA | 902 | GGC | E88G |
| CC171 | CCAACACC | | ACACC | | | T90A |
| Guide- | AGGUUUAUUCCU | 704 | AGGTTTATTCCTGAC | 903 | GGC | I163V |
| CC172 | GACCCCAA | | CCCAA | | | |
| Guide- | CCAAGCUUUUCC | 705 | CCAAGCTTTTCCTTG | 904 | CGC | K116R |
| CC173 | UUGUUGAC | | TTGAC | | | |
| Guide- | UUAGUGUCUGCA | 706 | TTAGTGTCTGCACAT | 905 | GGC | V459A |
| CC174 | CAUCCACU | | CCACT | | | |
| Guide- | CCACUAGCUUUC | 707 | CCACTAGCTTTCCAA | 906 | GGC | L472P |
| CC175 | CAAACGGU | | ACGGT | | | |
| Guide- | CCUCAAGGGGUG | 708 | CCTCAAGGGGTGCCA | 907 | AGC | K149G |
| CC176 | CCAGGGGA | | GGGGA | | | |
| Guide- | UGUGAAACGCGC | 709 | TGTGAAACGCGCCTA | 908 | GGC | K176G |
| CC177 | CUACCAUC | | CCATC | | | |
| Guide- | CUAGUGCAUUCA | 710 | CTAGTGCATTCAAGC | 909 | GGC | K484G |
| CC178 | AGCACAAU | | ACAAT | | | |
| Guide- | CCGCGUGGGCGA | 711 | CCGCGTGGGCGACGA | 910 | GGC | D52G |
| CC179 | CGAGAUUA | | GATTA | | | |
| Guide- | UUAUUCCUGACC | 712 | TTATTCCTGACCCCA | 911 | GGC | D165G |
| CC180 | CCAAGGCG | | AGGCG | | | |
| Guide- | ACUCCAGAAUCA | 713 | ACTCCAGAATCATTA | 912 | CGC | S285P |
| CC181 | UUAACUCU | | ACTCT | | | |
| Guide- | GGCUGUUAUGCA | 714 | GGCTGTTATGCACTG | 913 | GGC | T59A |
| CC182 | CUGAUCCG | | ATCCG | | | |
| Guide- | UUCAUCUAACGA | 715 | TTCATCTAACGAGAT | 914 | GGC | H378R |
| CC183 | GAUUAAAA | | TAAAA | | | T380A |
| | | | | | | R381G |
| Guide- | ACAGGAGAAAUA | 716 | ACAGGAGAAATATAA | 915 | GGC | E257G |
| CC184 | UAAUAGCU | | TAGCT | | | K258G |
| | | | | | | Y259C |
| Guide- | UCAGGAUGAAUU | 717 | TCAGGATGAATTTTT | 916 | AGC | F200P |
| CC185 | UUUCCGAC | | CCGAC | | | I201T |
| Guide- | GACUUCAAUUAU | 718 | GACTTCAATTATGAA | 917 | GGC | N268G |
| CC186 | GAACGUCA | | CGTCA | | | Y269C |
| Guide- | AGGAGCGGUCAA | 719 | AGGAGCGGTCAACAA | 918 | AGC | V120A |
| CC187 | CAAGGAAA | | GGAAA | | | S123P |
| Guide- | GAUUAAAAGGCA | 720 | GATTAAAAGGCACCG | 919 | GGC | K383G |
| CC188 | CCGAAGGA | | AAGGA | | | T385A |
| Guide- | AAAAUUCAUCCU | 721 | AAAATTCATCCTGAA | 920 | GGC | I201V |
| CC189 | GAAAGUGA | | AGTGA | | | |
| gRNA931; | AUAAUAGCUGGC | 722 | ATAATAGCTGGCATC | 921 | GACT | S261G |
| gRNA2342; | AUCACGGU | | ACGGT | | | N260D |
| gRNA2343; | | | | | | |
| CC200 | | | | | | |
| gRNA889 | CCACUAGCUUUC | 723 | CCACTAGCTTTCCAA | 922 | GGCC | L472P |
| | CAAACGGU | | ACGGT | | | |
| gRNA908 | GCUGAACUGAUA | 724 | GCTGAACTGATAGTC | 923 | TGCC | S279P |
| | GUCAACGU | | AACGT | | | |
| gRNA918 | UUUGACAAAGCC | 725 | TTTGACAAAGCCCGG | 924 | TGCA | V64A |
| | CGGAUCAG | | ATCAG | | | |
| gRNA923 | UGAAAGUGAGGC | 726 | TGAAAGTGAGGCCAG | 925 | GGCT | Silent |
| | CAGGUACU | | GTACT | | | |
| gRNA928 | AAACAGUCAGGU | 727 | AAACAGTCAGGTGAG | 926 | CGCT | S251G |
| | GAGUGAAU | | TGAAT | | | |
| gRNA929 | AACUACAGGAGA | 728 | AACTACAGGAGAAAT | 927 | AGCT | Silent |
| | AAUAUAAU | | ATAAT | | | |
| gRNA944 | GAUUAAAAGGCA | 729 | GATTAAAAGGCACCG | 928 | GGCA | Silent |
| | CCGAAGGA | | AAGGA | | | |
| gRNA291 | GGCUUUACCUCC | 730 | GGCTTTACCTCCAAT | 929 | AGG | A to G at |
| | AAUGGUGC | | GGTGC | | | splice site |
| | | | | | | (KO) |
| gRNA295 | CAGUACCUGGCC | 731 | CAGTACCTGGCCTCA | 930 | AGG | A to G at |
| | UCACUUUC | | CTTTC | | | splice site |
| | | | | | | (KO) |

### Nucleobase Editors

[0169] Useful in the methods and compositions described herein are nucleobase editors that edit, modify or alter a target nucleotide sequence of a polynucleotide. Nucleobase editors described herein typically include a polynucleotide programmable nucleotide binding domain and a nucleobase editing domain (e.g., adenosine deaminase). A polynucleotide programmable nucleotide binding domain, when in conjunction with a bound guide polynucleotide (e.g., gRNA), can specifically bind to a target polynucleotide sequence and thereby localize the base editor to the target nucleic acid sequence desired to be edited.

### Polynucleotide Programmable Nucleotide Binding Domain

[0170] Polynucleotide programmable nucleotide binding domains bind polynucleotides (e.g., RNA, DNA). A polynucleotide programmable nucleotide binding domain of a base editor can itself comprise one or more domains (e.g., one or more nuclease domains). In some embodiments, the nuclease domain of a polynucleotide programmable nucleotide binding domain comprises an endonuclease or an exonuclease.

[0171] Disclosed herein are base editors comprising a polynucleotide programmable nucleotide binding domain comprising all or a portion (e.g., a functional portion) of a CRISPR protein (i.e., a base editor comprising as a domain all or a portion (e.g., a functional portion) of a CRISPR protein (e.g., a Cas protein), also referred to as a “CRISPR protein-derived domain” of the base editor). A CRISPR protein-derived domain incorporated into a base editor can be modified compared to a wild-type or natural version of the CRISPR protein. A CRISPR protein-derived domain can comprise one or more mutations, insertions, deletions, rearrangements and/or recombinations relative to a wild-type or natural version of the CRISPR protein.

[0172] Cas proteins that can be used herein include class 1 and class 2. Non-limiting examples of Cas proteins include Cas1, Cas1B, Cas2, Cas3, Cas4, Cas5, Cas5d, Cas5t, Cas5h, Cas5a, Cas6, Cas7, Cas8, Cas9 (also known as Csn1 or Csx12), Cas10, Csy1, Csy2, Csy3, Csy4, Cse1, Cse2, Cse3, Cse4, Cse5e, Csc1, Csc2, Csa5, Csn1, Csn2, Csm1, Csm2, Csm3, Csm4, Csm5, Csm6, Cmr1, Cmr3, Cmr4, Cmr5, Cmr6, Csb1, Csb2, Csb3, Csx17, Csx14, Csx10, Csx16, CsaX, Csx3, Csx1, Csx1S, Csf1, Csf2, CsO, Csf4, Csd1, Csd2, Cst1, Cst2, Csh1, Csh2, Csa1, Csa2, Csa3, Csa4, Csa5, Cas12a/Cpf1, Cas12b/C2c1 (e.g., SEQ ID NO: 232), Cas12c/C2c3, Cas12d/CasY, Cas12e/CasX, Cas12g, Cas12h, Cas12i, and Cas12j/CasΦ, CARF, DinG, homologues thereof, or modified versions thereof. A CRISPR enzyme can direct cleavage of one or both strands at a target sequence, such as within a target sequence and/or within a complement of a target sequence. For example, a CRISPR enzyme can direct cleavage of one or both strands within about 1, 2, 3, 4, 5, 6, 7, 8, 9, 10, 15, 20, 25, 50, 100, 200, 500, or more base pairs from the first or last nucleotide of a target sequence.

[0173] A vector that encodes a CRISPR enzyme that is mutated to with respect to a corresponding wild-type enzyme such that the mutated CRISPR enzyme lacks the ability to cleave one or both strands of a target polynucleotide containing a target sequence can be used. A Cas protein (e.g., Cas9, Cas12) or a Cas domain (e.g., Cas9, Cas12) can refer to a polypeptide or domain with at least or at least about 50%, 60%, 70%, 80%, 90%, 91%, 92%, 93%, 94%, 95%, 96%, 97%, 98%, 99%, or 100% sequence identity and/or sequence homology to a wild-type exemplary Cas polypeptide or Cas domain. Cas (e.g., Cas9, Cas12) can refer to the wild-type or a modified form of the Cas protein that can comprise an amino acid change such as a deletion, insertion, substitution, variant, mutation, fusion, chimera, or any combination thereof.

[0174] In some embodiments, a CRISPR protein-derived domain of a base editor can include all or a portion (e.g., a functional portion) of Cas9 from Corynebacterium ulcerans (NCBI Refs: NC_015683.1, NC_017317.1); Corynebacterium diphtheria (NCBI Refs: NC_016782.1, NC_016786.1); Spiroplasma syrphidicola (NCBI Ref: NC_021284.1); Prevotella intermedia (NCBI Ref: NC_017861.1); Spiroplasma taiwanense (NCBI Ref: NC_021846.1); Streptococcus iniae (NCBI Ref: NC_021314.1); Belliella baltica (NCBI Ref: NC_018010.1); Psychroflexus torquis (NCBI Ref: NC_018721.1); Streptococcus thermophilus (NCBI Ref: YP_820832.1); Listeria innocua (NCBI Ref: NP_472073.1); Campylobacter jejuni (NCBI Ref: YP_002344900.1); Neisseria meningitidis (NCBI Ref: YP_002342100.1), Streptococcus pyogenes, or Staphylococcus aureus.

[0175] Some aspects of the disclosure provide high fidelity Cas9 domains. High fidelity Cas9 domains are known in the art and described, for example, in Kleinstiver, B. P., et al. “High-fidelity CRISPR-Cas9 nucleases with no detectable genome-wide off-target effects.” Nature 529, 490-495 (2016); and Slaymaker, I. M., et al. “Rationally engineered Cas9 nucleases with improved specificity.” Science 351, 84-88 (2015); the entire contents of each of which are incorporated herein by reference. An Exemplary high fidelity Cas9 domain is provided in the Sequence Listing as SEQ ID NO: 233.

[0176] In some embodiments, any of the Cas9 fusion proteins or complexes provided herein comprise one or more of a D10A, N497X, a R661X, a Q695X, and/or a Q926X mutation, or a corresponding mutation in any of the amino acid sequences provided herein, wherein X is any amino acid.

[0177] Typically, Cas9 proteins, such as Cas9 from S. pyogenes (spCas9), require a “protospacer adjacent motif (PAM)” or PAM-like motif, which is a 2-6 base pair DNA sequence immediately following the DNA sequence targeted by the Cas9 nuclease in the CRISPR bacterial adaptive immune system. The presence of an NGG PAM sequence is required to bind a particular nucleic acid region, where the “N” in “NGG” is adenosine (A), thymidine (T), or cytosine (C), and the G is guanosine. In some embodiments, any of the fusion proteins or complexes provided herein may contain a Cas9 domain that is capable of binding a nucleotide sequence that does not contain a canonical (e.g., NGG) PAM sequence. Cas9 domains that bind to non-canonical PAM sequences have been described in the art and would be apparent to the skilled artisan. For example, Cas9 domains that bind non-canonical PAM sequences have been described in Kleinstiver, B. P., et al., “Engineered CRISPR-Cas9 nucleases with altered PAM specificities” Nature 523, 481-485 (2015); and Kleinstiver, B. P., et al., “Broadening the targeting range of Staphylococcus aureus CRISPR-Cas9 by modifying PAM recognition” Nature Biotechnology 33, 1293-1298 (2015); the entire contents of each are hereby incorporated by reference.

[0178] In some embodiments, the napDNAbp is a circular permutant (e.g., SEQ ID NO: 238).

[0179] In some embodiments, the polynucleotide programmable nucleotide binding domain comprises a nickase domain. Herein the term “nickase” refers to a polynucleotide programmable nucleotide binding domain comprising a nuclease domain that is capable of cleaving only one strand of the two strands in a duplexed nucleic acid molecule (e.g., DNA). For example, where a polynucleotide programmable nucleotide binding domain comprises a nickase domain derived from Cas9, the Cas9-derived nickase domain can include a D10A mutation and a histidine at position 840. In another example, a Cas9-derived nickase domain comprises an H840A mutation, while the amino acid residue at position 10 remains a D.

[0180] In some embodiments, a Cas9 nuclease has an inactive (e.g., an inactivated) DNA cleavage domain, that is, the Cas9 is a nickase, referred to as an “nCas9” protein (for “nickase” Cas9; SEQ ID NO: 201). The Cas9 nickase may be a Cas9 protein that is capable of cleaving only one strand of a duplexed nucleic acid molecule (e.g., a duplexed DNA molecule). In some embodiments the Cas9 nickase comprises an amino acid sequence that is at least 60%, at least 65%, at least 70%, at least 75%, at least 80%, at least 85%, at least 90%, at least 95%, at least 96%, at least 97%, at least 98%, at least 99%, or at least 99.5% identical to any one of the Cas9 nickases provided herein. Additional suitable Cas9 nickases will be apparent to those of skill in the art based on this disclosure and knowledge in the field and are within the scope of this disclosure.

[0181] Also provided herein are base editors comprising a polynucleotide programmable nucleotide binding domain which is catalytically dead (i.e., incapable of cleaving a target polynucleotide sequence). For example, in the case of a base editor comprising a Cas9 domain, the Cas9 can comprise both a D10A mutation and an H840A mutation. In further embodiments, a catalytically dead polynucleotide programmable nucleotide binding domain comprises a point mutation (e.g., D10A or H840A) as well as a deletion of all or a portion (e.g., a functional portion) of a nuclease domain. dCas9 domains are known in the art and described, for example, in Qi et al., “Repurposing CRISPR as an RNA-guided platform for sequence-specific control of gene expression.” Cell. 2013; 152(5):1173-83, the entire contents of which are incorporated herein by reference.

[0182] The term “protospacer adjacent motif (PAM)” or PAM-like motif refers to a 2-6 base pair DNA sequence immediately following the DNA sequence targeted by a nucleic acid programmable DNA binding protein. In some embodiments, the PAM can be a 5′ PAM (i.e., located upstream of the 5′ end of the protospacer). In other embodiments, the PAM can be a 3′ PAM (i.e., located downstream of the 5′ end of the protospacer). The PAM sequence can be any PAM sequence known in the art. Suitable PAM sequences include, but are not limited to, NGG, NGA, NGC, NGN, NGT, NGTT, NGCG, NGAG, NGAN, NGNG, NGCN, NGCG, NGTN, NNGRRT, NNNRRT, NNGRR(N), TTTV, TYCV, TYCV, TATV, NNNNGATT, NNAGAAW, or NAAAAC. Y is a pyrimidine; N is any nucleotide base; W is A or T.

[0183] A base editor provided herein can comprise a CRISPR protein-derived domain that is capable of binding a nucleotide sequence that contains a canonical or non-canonical protospacer adjacent motif (PAM) sequence.

[0184] In some embodiments, the PAM is an “NRN” PAM where the “N” in “NRN” is adenine (A), thymine (T), guanine (G), or cytosine (C), and the R is adenine (A) or guanine (G); or the PAM is an “NYN” PAM, wherein the “N” in NYN is adenine (A), thymine (T), guanine (G), or cytosine (C), and the Y is cytidine (C) or thymine (T), for example, as described in R. T. Walton et al., 2020, Science, 10.1126/science.aba8853 (2020), the entire contents of which are incorporated herein by reference.

[0185] Several PAM variants are described in Table 3 below.

TABLE 3
Cas9 proteins and corresponding PAM sequences.
N is A, C, T, or G; and V is A, C, or G.

| Variant | PAM |
|---|---|
| spCas9 | NGG |
| spCas9-VRQR | NGA |
| spCas9-VRER | NGCG |
| xCas9 (sp) | NGN |
| saCas9 | NNGRRT |
| saCas9-KKH | NNNRRT |
| spCas9-MQKSER | NGCG |
| spCas9-MQKSER | NGCN |
| spCas9-LRKIQK | NGTN |
| spCas9-LRVSQK | NGTN |
| spCas9-LRVSQL | NGTN |
| spCas9-MQKFRAER | NGC |
| Cpf1 | 5′(TTTV) |
| SpyMac | 5′-NAA-3′ |

[0186] In some embodiments, the PAM is NGC. In some embodiments, the NGC PAM is recognized by a Cas9 variant. In some embodiments, the NGC PAM Cas9 variant includes one or more amino acid substitutions selected from D1135M, S1136Q, G1218K, E1219F, A1322R, D1332A, R1335E, and T1337R (collectively termed “MQKFRAER”) of spCas9 (SEQ ID NO: 197), or a corresponding mutation in another Cas9. In some embodiments, the Cas9 variant contains one or more amino acid substitutions selected from D1135V, G1218R, R1335Q, and T1337R (collectively termed VRQR) of spCas9 (SEQ ID NO: 197), or a corresponding mutation in another Cas9. In some embodiments, the Cas9 variant contains one or more amino acid substitutions selected from D1135V, G1218R, R1335E, and T1337R (collectively termed VRER) of spCas9 (SEQ ID NO: 197), or a corresponding mutation in another Cas9. In some embodiments, the Cas9 variant contains one or more amino acid substitutions selected from E782K, N968K, and R1015H (collectively termed KHH) of saCas9 (SEQ ID NO: 218). In some embodiments, the Cas9 variant includes one or more amino acid substitutions selected from D1135M, S1136Q, G1218K, E1219S, R1335E, and T1337R (collectively termed “MQKSER”) of spCas9 (SEQ ID No: 197), or a corresponding mutation in another Cas9. In some embodiments, the Cas9 variant includes one or more amino acid substitutions selected from D1135M, S1136Q, G1218K, E1219S, R1335E, and T1337R (collectively termed “MQKSER”) of spCas9 (SEQ ID NO: 197), or a corresponding mutation in another Cas9.

[0187] In some embodiments, a CRISPR protein-derived domain of a base editor comprises all or a portion (e.g., a functional portion) of a Cas9 protein with a canonical PAM sequence (NGG). In other embodiments, a Cas9-derived domain of a base editor can employ a non-canonical PAM sequence. Such sequences have been described in the art and would be apparent to the skilled artisan. For example, Cas9 domains that bind non-canonical PAM sequences have been described in Kleinstiver, B. P., et al., “Engineered CRISPR-Cas9 nucleases with altered PAM specificities” Nature 523, 481-485 (2015); and Kleinstiver, B. P., et al., “Broadening the targeting range of Staphylococcus aureus CRISPR-Cas9 by modifying PAM recognition” Nature Biotechnology 33, 1293-1298 (2015); R. T. Walton et al. “Unconstrained genome targeting with near-PAMless engineered CRISPR-Cas9 variants” Science 10.1126/science.aba8853 (2020); Hu et al. “Evolved Cas9 variants with broad PAM compatibility and high DNA specificity,” Nature, 2018 Apr. 5, 556(7699), 57-63; Miller et al., “Continuous evolution of SpCas9 variants compatible with non-G PAMs” Nat. Biotechnol., 2020 April; 38(4):471-481; the entire contents of each are hereby incorporated by reference.

### Fusion Proteins or Complexes Comprising a NapDNAbp and a Deaminase

[0188] Some aspects of the disclosure provide fusion proteins or complexes comprising a Cas9 domain or other nucleic acid programmable DNA binding protein (e.g., Cas12) and one or more adenosine deaminase domains. It should be appreciated that the Cas9 domain may be any of the Cas9 domains or Cas9 proteins (e.g., dCas9 or nCas9) provided herein. In some embodiments, any of the Cas9 domains or Cas9 proteins (e.g., dCas9 or nCas9) provided herein may be fused with any of the adenosine deaminases provided herein. The domains of the base editors disclosed herein can be arranged in any order.

[0189] In some embodiments, the fusion proteins or complexes comprising an adenosine deaminase and a napDNAbp (e.g., Cas9 or Cas12 domain) do not include a linker sequence. In some embodiments, a linker is present between the adenosine deaminase and the napDNAbp. In some embodiments, adenosine deaminase and the napDNAbp are fused via any of the linkers provided herein. For example, in some embodiments the adenosine deaminase and the napDNAbp are fused via any of the linkers provided herein.

[0190] It should be appreciated that the fusion proteins or complexes of the present disclosure may comprise one or more additional features. For example, in some embodiments, the fusion protein or complex may comprise inhibitors, cytoplasmic localization sequences, export sequences, such as nuclear export sequences, or other localization sequences, as well as sequence tags that are useful for solubilization, purification, or detection of the fusion proteins or complexes. Suitable protein tags provided herein include, but are not limited to, biotin carboxylase carrier protein (BCCP) tags, myc-tags, calmodulin-tags, FLAG-tags, hemagglutinin (HA)-tags, polyhistidine tags, also referred to as histidine tags or His-tags, maltose binding protein (MBP)-tags, nus-tags, glutathione-S-transferase (GST)-tags, green fluorescent protein (GFP)-tags, thioredoxin-tags, S-tags, Softags (e.g., Softag 1, Softag 3), strep-tags, biotin ligase tags, FlAsH tags, V5 tags, and SBP-tags. Additional suitable sequences will be apparent to those of skill in the art. In some embodiments, the fusion protein or complex comprises one or more His tags.

[0191] Exemplary, yet nonlimiting, fusion proteins are described in International PCT Application Nos. PCT/US2017/045381, PCT/US2019/044935, and PCT/US2020/016288, each of which is incorporated herein by reference for its entirety.

Fusion Proteins or Complexes with Internal Insertions

[0192] Provided herein are fusion proteins or complexes comprising a heterologous polypeptide fused to a nucleic acid programmable nucleic acid binding protein, for example, a napDNAbp. The heterologous polypeptide can be fused to the napDNAbp at a C-terminal end of the napDNAbp, an N-terminal end of the napDNAbp, or inserted at an internal location of the napDNAbp. In some embodiments, the heterologous polypeptide is a deaminase (e.g., adenosine deaminase) or a functional fragment thereof. For example, a fusion protein can comprise a deaminase flanked by an N-terminal fragment and a C-terminal fragment of a Cas9 or Cas12 (e.g., Cas12b/C2c1), polypeptide.

[0193] The deaminase can be a circular permutant deaminase. In some embodiments, the deaminase is a circular permutant TadA, circularly permutated at amino acid residue 116, 136, or 65 as numbered in a TadA reference sequence.

[0194] The fusion protein or complexes can comprise more than one deaminase. The fusion protein or complex can comprise, for example, 1, 2, 3, 4, 5 or more deaminases. The deaminases in a fusion protein or complex can be adenosine deaminases.

[0195] In some embodiments, the napDNAbp in the fusion protein or complex contains a Cas9 polypeptide or a fragment thereof. The Cas9 polypeptide can be a variant Cas9 polypeptide. The Cas9 polypeptide can be a circularly permuted Cas9 protein.

[0196] The heterologous polypeptide (e.g., deaminase) can be inserted in the napDNAbp (e.g., Cas9 or Cas12 (e.g., Cas12b/C2c1)) at a suitable location, for example, such that the napDNAbp retains its ability to bind the target polynucleotide and a guide nucleic acid. A deaminase (e.g., adenosine deaminase can be inserted into a napDNAbp without compromising function of the deaminase (e.g., base editing activity) or the napDNAbp (e.g., ability to bind to target nucleic acid and guide nucleic acid).

[0197] In some embodiments, the deaminase (e.g., adenosine deaminase) is inserted in regions of the Cas9 polypeptide comprising higher than average B-factors (e.g., higher B factors compared to the total protein or the protein domain comprising the disordered region). Cas9 polypeptide positions comprising a higher than average B-factor can include, for example, residues 768, 792, 1052, 1015, 1022, 1026, 1029, 1067, 1040, 1054, 1068, 1246, 1247, and 1248 as numbered in the above Cas9 reference sequence. Cas9 polypeptide regions comprising a higher than average B-factor can include, for example, residues 792-872, 792-906, and 2-791 as numbered in the above Cas9 reference sequence.

[0198] In some embodiments, a heterologous polypeptide (e.g., deaminase) is inserted in a flexible loop of a Cas9 polypeptide. The flexible loop portions can be selected from the group consisting of 530-537, 569-570, 686-691, 943-947, 1002-1025, 1052-1077, 1232-1247, or 1298-1300 as numbered in the above Cas9 reference sequence, or a corresponding amino acid residue in another Cas9 polypeptide. The flexible loop portions can be selected from the group consisting of: 1-529, 538-568, 580-685, 692-942, 948-1001, 1026-1051, 1078-1231, or 1248-1297 as numbered in the above Cas9 reference sequence, or a corresponding amino acid residue in another Cas9 polypeptide.

[0199] A heterologous polypeptide (e.g., adenine deaminase) can be inserted into a Cas9 polypeptide region corresponding to amino acid residues: 1017-1069, 1242-1247, 1052-1056, 1060-1077, 1002-1003, 943-947, 530-537, 568-579, 686-691, 1242-1247, 1298-1300, 1066-1077, 1052-1056, or 1060-1077 as numbered in the above Cas9 reference sequence, or a corresponding amino acid residue in another Cas9 polypeptide.

[0200] A heterologous polypeptide (e.g., adenine deaminase) can be inserted in place of a deleted region of a Cas9 polypeptide. The deleted region can correspond to an N-terminal or C-terminal portion of the Cas9 polypeptide. Exemplary internal fusions base editors are provided in Table 4A below:

TABLE 4A
Insertion loci in Cas9 proteins

| BE ID | Modification | Other ID |
|---|---|---|
| IBE001 | Cas9 TadA ins 1015 | ISLAY01 |
| IBE002 | Cas9 TadA ins 1022 | ISLAY02 |
| IBE003 | Cas9 TadA ins 1029 | ISLAY03 |
| IBE004 | Cas9 TadA ins 1040 | ISLAY04 |
| IBE005 | Cas9 TadA ins 1068 | ISLAY05 |
| IBE006 | Cas9 TadA ins 1247 | ISLAY06 |
| IBE007 | Cas9 TadA ins 1054 | ISLAY07 |
| IBE008 | Cas9 TadA ins 1026 | ISLAY08 |
| IBE009 | Cas9 TadA ins 768 | ISLAY09 |
| IBE020 | delta HNH TadA 792 | ISLAY20 |
| IBE021 | N-term fusion single TadA helix truncated 165-end | ISLAY21 |
| IBE029 | TadA-Circular Permutant116 ins1067 | ISLAY29 |
| IBE031 | TadA-Circular Permutant 136 ins1248 | ISLAY31 |
| IBE032 | TadA-Circular Permutant 136ins 1052 | ISLAY32 |
| IBE035 | delta 792-872 TadA ins | ISLAY35 |
| IBE036 | delta 792-906 TadA ins | ISLAY36 |
| IBE043 | TadA-Circular Permutant 65 ins1246 | ISLAY43 |
| IBE044 | TadA ins C-term truncate2 791 | ISLAY44 |

[0201] A heterologous polypeptide (e.g., deaminase) can be inserted within a structural or functional domain of a Cas9 polypeptide. A heterologous polypeptide (e.g., deaminase) can be inserted between two structural or functional domains of a Cas9 polypeptide. A heterologous polypeptide (e.g., deaminase) can be inserted in place of a structural or functional domain of a Cas9 polypeptide, for example, after deleting the domain from the Cas9 polypeptide. The structural or functional domains of a Cas9 polypeptide can include, for example, RuvC I, RuvC II, RuvC III, Rec1, Rec2, PI, or HNH.

[0202] A fusion protein can comprise a linker between the deaminase and the napDNAbp polypeptide. The linker can be a peptide or a non-peptide linker. For example, the linker can be an XTEN, (GGGS)ₙ (SEQ ID NO: 246), SGGSSGGS (SEQ ID NO: 330), (GGGGS)ₙ (SEQ ID NO: 247), (G)ₙ, (EAAAK)n (SEQ ID NO: 248), (GGS)ₙ, SGSETPGTSESATPES (SEQ ID NO: 249). In some embodiments, the fusion protein comprises a linker between the N-terminal Cas9 fragment and the deaminase. In some embodiments, the fusion protein comprises a linker between the C-terminal Cas9 fragment and the deaminase. In some embodiments, the N-terminal and C-terminal fragments of napDNAbp are connected to the deaminase with a linker. In some embodiments, the N-terminal and C-terminal fragments are joined to the deaminase domain without a linker. In some embodiments, the fusion protein comprises a linker between the N-terminal Cas9 fragment and the deaminase but does not comprise a linker between the C-terminal Cas9 fragment and the deaminase. In some embodiments, the fusion protein comprises a linker between the C-terminal Cas9 fragment and the deaminase but does not comprise a linker between the N-terminal Cas9 fragment and the deaminase.

[0203] In some embodiments, the napDNAbp in the fusion protein or complex is a Cas12 polypeptide, e.g., Cas12b/C2c1, or a functional fragment thereof capable of associating with a nucleic acid (e.g., a gRNA) that guides the Cas12 to a specific nucleic acid sequence. The Cas12 polypeptide can be a variant Cas12 polypeptide. In other embodiments, the N- or C-terminal fragments of the Cas12 polypeptide comprise a nucleic acid programmable DNA binding domain or a RuvC domain. In other embodiments, the fusion protein contains a linker between the Cas12 polypeptide and the catalytic domain. In other embodiments, the amino acid sequence of the linker is GGSGGS (SEQ ID NO: 250) or GSSGSETPGTSESATPESSG (SEQ ID NO: 251). In other embodiments, the linker is a rigid linker. In other embodiments of the above aspects, the linker is encoded by GGAGGCTCTGGAGGAAGC (SEQ ID NO: 252) or GGCTCTTCTGGATCTGAAACACCTGGCACAAGCGAGAGCGCCACCCCTGAGAGCTCTGGC (SEQ ID NO: 253).

[0204] In other embodiments, the fusion protein or complex contains a nuclear localization signal (e.g., a bipartite nuclear localization signal). In other embodiments, the amino acid sequence of the nuclear localization signal is MAPKKKRKVGIHGVPAA (SEQ ID NO: 261). In other embodiments of the above aspects, the nuclear localization signal is encoded by the following sequence:

[0205] ATGGCCCCAAAGAAGAAGCGGAAGGTCGGTATCCACGGAGTCCCAGCAGCC (SEQ ID NO: 262). In other embodiments, the Cas12b polypeptide contains a mutation that silences the catalytic activity of a RuvC domain. In other embodiments, the Cas12b polypeptide contains D574A, D829A and/or D952A mutations.

[0206] In some embodiments, the fusion protein or complex comprises a napDNAbp domain (e.g., Cas12-derived domain) with an internally fused nucleobase editing domain (e.g., all or a portion (e.g., a functional portion) of a deaminase domain, e.g., an adenosine deaminase domain). In some embodiments, the napDNAbp is a Cas12b. In some embodiments, the base editor comprises a BhCas12b domain with an internally fused TadA*8 domain inserted at the loci provided in Table 4B below.

TABLE 4B
Insertion loci in Cas12b proteins

| | Insertion site | Inserted between aa |
|---|---|---|
| BhCas12b | | |
| position 1 | 153 | PS |
| position 2 | 255 | KE |
| position 3 | 306 | DE |
| position 4 | 980 | DG |
| position 5 | 1019 | KL |
| position 6 | 534 | FP |
| position 7 | 604 | KG |
| position 8 | 344 | HF |
| BvCas12b | | |
| position 1 | 147 | PD |
| position 2 | 248 | GG |
| position 3 | 299 | PE |
| position 4 | 991 | GE |
| position 5 | 1031 | KM |
| AaCas12b | | |
| position 1 | 157 | PG |
| position 2 | 258 | VG |
| position 3 | 310 | DP |
| position 4 | 1008 | GE |
| position 5 | 1044 | GK |

[0207] In some embodiments, the base editing system described herein is an ABE with TadA inserted into a Cas9. Polypeptide sequences of relevant ABEs with TadA inserted into a Cas9 are provided in the attached Sequence Listing as SEQ ID NOs: 263-308.

[0208] Exemplary, yet nonlimiting, fusion proteins are described in International PCT Application Nos. PCT/US2020/016285 and U.S. Provisional Application Nos. 62/852,228 and 62/852,224, the contents of which are incorporated by reference herein in their entireties.

### A to G Editing

[0209] In some embodiments, a base editor described herein comprises an adenosine deaminase domain. Such an adenosine deaminase domain of a base editor can facilitate the editing of an adenine (A) nucleobase to a guanine (G) nucleobase by deaminating the A to form inosine (I), which exhibits base pairing properties of G. In some embodiments, an A-to-G base editor further comprises an inhibitor of inosine base excision repair, for example, a uracil glycosylase inhibitor (UGI) domain or a catalytically inactive inosine specific nuclease. Without wishing to be bound by any particular theory, the UGI domain or catalytically inactive inosine specific nuclease can inhibit or prevent base excision repair of a deaminated adenosine residue (e.g., inosine), which can improve the activity or efficiency of the base editor.

[0210] A base editor comprising an adenosine deaminase can act on any polynucleotide, including DNA, RNA and DNA-RNA hybrids. In an embodiment an adenosine deaminase domain of a base editor comprises all or a portion (e.g., a functional portion) of an ADAT comprising one or more mutations which permit the ADAT to deaminate a target A in DNA. For example, the base editor can comprise all or a portion (e.g., a functional portion) of an ADAT from Escherichia coli (EcTadA) comprising one or more of the following mutations: D108N, A106V, D147Y, E155V, L84F, H123Y, I156F, or a corresponding mutation in another adenosine deaminase. Exemplary ADAT homolog polypeptide sequences are provided in the Sequence Listing as SEQ ID NOs: 1 and 309-315.

[0211] The adenosine deaminase can be derived from any suitable organism (e.g., E. coli). In some embodiments, the adenosine deaminase is from Escherichia coli, Staphylococcus aureus, Salmonella typhi, Shewanella putrefaciens, Haemophilus influenzae, Caulobacter crescentus, or Bacillus subtilis. In some embodiments, the adenine deaminase is a naturally-occurring adenosine deaminase that includes one or more mutations corresponding to any of the mutations provided herein (e.g., mutations in ecTadA). The corresponding residue in any homologous protein can be identified by e.g., sequence alignment and determination of homologous residues. The mutations in any naturally-occurring adenosine deaminase (e.g., having homology to ecTadA) that correspond to any of the mutations described herein (e.g., any of the mutations identified in ecTadA) can be generated accordingly.

[0212] In some embodiments, the adenosine deaminase comprises an amino acid sequence that is at least 60%, at least 65%, at least 70%, at least 75%, at least 80%, at least 85%, at least 90%, at least 95%, at least 96%, at least 97%, at least 98%, at least 99%, or at least 99.5% identical to any one of the amino acid sequences set forth in any of the adenosine deaminases provided herein. It should be appreciated that adenosine deaminases provided herein may include one or more mutations (e.g., any of the mutations provided herein). The disclosure provides any deaminase domains with a certain percent identify plus any of the mutations or combinations thereof described herein. In some embodiments, the adenosine deaminase comprises an amino acid sequence that has 1, 2, 3, 4, 5, 6, 7, 8, 9, 10, 11, 12, 13, 14, 15, 16, 17, 18, 19, 20, 21, 22, 21, 24, 25, 26, 27, 28, 29, 30, 31, 32, 33, 34, 35, 36, 37, 38, 39, 40, 41, 42, 43, 44, 45, 46, 47, 48, 49, 50, or more mutations compared to a reference sequence, or any of the adenosine deaminases provided herein.

[0213] It should be appreciated that any of the mutations provided herein (e.g., based on a TadA reference sequence, such as TadA*7.10 (SEQ ID NO: 1)) can be introduced into other adenosine deaminases, such as E. coli TadA (ecTadA), S. aureus TadA (saTadA), or other adenosine deaminases (e.g., bacterial adenosine deaminases). In some embodiments, the TadA reference sequence is TadA*7.10 (SEQ ID NO: 1). It would be apparent to the skilled artisan that additional deaminases may similarly be aligned to identify homologous amino acid residues that can be mutated as provided herein. Thus, any of the mutations identified in a TadA reference sequence can be made in other adenosine deaminases (e.g., ecTada) that have homologous amino acid residues. It should also be appreciated that any of the mutations provided herein can be made individually or in any combination in a TadA reference sequence or another adenosine deaminase.

[0214] In some embodiments, the adenosine deaminase comprises an alteration or set of alterations selected from those listed in Tables 5A-5E below:

TABLE 5A
Adenosine Deaminase Variants. Residue positions in the E. coli TadA variant (TadA*) are indicated.

| | 23 | 26 | 36 | 37 | 48 | 49 | 51 | 72 | 84 | 87 | 106 | 108 | 123 | 125 | 142 | 146 | 147 | 152 | 155 | 156 | 157 | 161 |
|---|---|---|---|---|---|---|---|---|---|---|---|---|---|---|---|---|---|---|---|---|---|---|
| TadA*0.1 | W | R | H | N | P | | R | N | L | S | A | D | H | G | A | S | D | R | E | I | K | K |
| TadA*0.2 | W | R | H | N | P | | R | N | L | S | A | D | H | G | A | S | D | R | E | I | K | K |
| TadA*1.1 | W | R | H | N | P | | R | N | L | S | A | N | H | G | A | S | D | R | E | I | K | K |
| TadA*1.2 | W | R | H | N | P | | R | N | L | S | V | N | H | G | A | S | D | R | E | I | K | K |
| TadA*2.1 | W | R | H | N | P | | R | N | L | S | V | N | H | G | A | S | Y | R | V | I | K | K |
| TadA*2.2 | W | R | H | N | P | | R | N | L | S | V | N | H | G | A | S | Y | R | V | I | K | K |
| TadA*2.3 | W | R | H | N | P | | R | N | L | S | V | N | H | G | A | S | Y | R | V | I | K | K |
| TadA*2.4 | W | R | H | N | P | | R | N | L | S | V | N | H | G | A | S | Y | R | V | I | K | K |
| TadA*2.5 | W | R | H | N | P | | R | N | L | S | V | N | H | G | A | S | Y | R | V | I | K | K |
| TadA*2.6 | W | R | H | N | P | | R | N | L | S | V | N | H | G | A | S | Y | R | V | I | K | K |
| TadA*2.7 | W | R | H | N | P | | R | N | L | S | V | N | H | G | A | S | Y | R | V | I | K | K |
| TadA*2.8 | W | R | H | N | P | | R | N | L | S | V | N | H | G | A | S | Y | R | V | I | K | K |
| TadA*2.9 | W | R | H | N | P | | R | N | L | S | V | N | H | G | A | S | Y | R | V | I | K | K |
| TadA*2.10 | W | R | H | N | P | | R | N | L | S | V | N | H | G | A | S | Y | R | V | I | K | K |
| TadA*2.11 | W | R | H | N | P | | R | N | L | S | V | N | H | G | A | S | Y | R | V | I | K | K |
| TadA*2.12 | W | R | H | N | P | | R | N | L | S | V | N | H | G | A | S | Y | R | V | I | K | K |
| TadA*3.1 | W | R | H | N | P | | R | N | F | S | V | N | Y | G | A | S | Y | R | V | F | K | K |
| TadA*3.2 | W | R | H | N | P | | R | N | F | S | V | N | Y | G | A | S | Y | R | V | F | K | K |
| TadA*3.3 | W | R | H | N | P | | R | N | F | S | V | N | Y | G | A | S | Y | R | V | F | K | K |
| TadA*3.4 | W | R | H | N | P | | R | N | F | S | V | N | Y | G | A | S | Y | R | V | F | K | K |
| TadA*3.5 | W | R | H | N | P | | R | N | F | S | V | N | Y | G | A | S | Y | R | V | F | K | K |
| TadA*3.6 | W | R | H | N | P | | R | N | F | S | V | N | Y | G | A | S | Y | R | V | F | K | K |
| TadA*3.7 | W | R | H | N | P | | R | N | F | S | V | N | Y | G | A | S | Y | R | V | F | K | K |
| TadA*3.8 | W | R | H | N | P | | R | N | F | S | V | N | Y | G | A | S | Y | R | V | F | K | K |
| TadA*4.1 | W | R | H | N | P | | R | N | L | S | V | N | H | G | N | S | Y | R | V | I | K | K |
| TadA*4.2 | W | G | H | N | P | | R | N | L | S | V | N | H | G | N | S | Y | R | V | I | K | K |
| TadA*4.3 | W | R | H | N | P | | R | N | F | S | V | N | Y | G | N | S | Y | R | V | F | K | K |
| TadA*5.1 | W | R | L | N | P | | L | N | F | S | V | N | Y | G | A | C | Y | R | V | F | N | K |
| TadA*5.2 | W | R | H | S | P | | R | N | F | S | V | N | Y | G | A | S | Y | R | V | F | K | T |
| TadA*5.3 | W | R | L | N | P | | L | N | I | S | V | N | Y | G | A | C | Y | R | V | F | N | K |
| TadA*5.4 | W | R | H | S | P | | R | N | F | S | V | N | Y | G | A | S | Y | R | V | F | K | T |
| TadA*5.5 | W | R | L | N | P | | L | N | F | S | V | N | Y | G | A | C | Y | R | V | F | N | K |
| TadA*5.6 | W | R | L | N | P | | L | N | F | S | V | N | Y | G | A | C | Y | R | V | F | N | K |
| TadA*5.7 | W | R | L | N | P | | L | N | F | S | V | N | Y | G | A | C | Y | R | V | F | N | K |
| TadA*5.8 | W | R | L | N | P | | L | N | F | S | V | N | Y | G | A | C | Y | R | V | F | N | K |
| TadA*5.9 | W | R | L | N | P | | L | N | F | S | V | N | Y | G | A | C | Y | R | V | F | N | K |
| TadA*5.10 | W | R | L | N | P | | L | N | F | S | V | N | Y | G | A | C | Y | R | V | F | N | K |
| TadA*5.11 | W | R | L | N | P | | L | N | F | S | V | N | Y | G | A | C | Y | R | V | F | N | K |
| TadA*5.12 | W | R | L | N | P | | L | N | F | S | V | N | Y | G | A | C | Y | R | V | F | N | K |
| TadA*5.13 | W | R | H | N | P | | L | D | F | S | V | N | Y | A | A | S | Y | R | V | F | K | K |
| TadA*5.14 | W | R | H | N | S | | L | N | F | C | V | N | Y | G | A | S | Y | R | V | F | K | K |
| TadA*6.1 | W | R | H | N | S | | L | N | F | S | V | N | Y | G | N | S | Y | R | V | F | K | K |
| TadA*6.2 | W | R | H | N | T | V | L | N | F | S | V | N | Y | G | N | S | Y | R | V | F | N | K |
| TadA*6.3 | W | R | L | N | S | | L | N | F | S | V | N | Y | G | A | C | Y | R | V | F | N | K |
| TadA*6.4 | W | R | L | N | S | | L | N | F | S | V | N | Y | G | N | C | Y | R | V | F | N | K |
| TadA*6.5 | W | R | L | N | T | V | L | N | F | S | V | N | Y | G | A | C | Y | R | V | F | N | K |
| TadA*6.6 | W | R | L | N | T | V | L | N | F | S | V | N | Y | G | N | C | Y | R | V | F | N | K |
| TadA*7.1 | W | R | L | N | A | | L | N | F | S | V | N | Y | G | A | C | Y | R | V | F | N | K |
| TadA*7.2 | W | R | L | N | A | | L | N | F | S | V | N | Y | G | N | C | Y | R | V | F | N | K |
| TadA*7.3 | L | R | L | N | A | | L | N | F | S | V | N | Y | G | A | C | Y | R | V | F | N | K |
| TadA*7.4 | R | R | L | N | A | | L | N | F | S | V | N | Y | G | A | C | Y | R | V | F | N | K |
| TadA*7.5 | W | R | L | N | A | | L | N | F | S | V | N | Y | G | A | C | Y | H | V | F | N | K |
| TadA*7.6 | W | R | L | N | A | | L | N | I | S | V | N | Y | G | A | C | Y | P | V | F | N | K |
| TadA*7.7 | L | R | L | N | A | | L | N | F | S | V | N | Y | G | A | C | Y | P | V | F | N | K |
| TadA*7.8 | L | R | L | N | A | | L | N | F | S | V | N | Y | G | N | C | Y | R | V | F | N | K |
| TadA*7.9 | L | R | L | N | A | | L | N | F | S | V | N | Y | G | N | C | Y | P | V | F | N | K |
| TadA*7.10 | R | R | L | N | A | | L | N | F | S | V | N | Y | G | A | C | Y | P | V | F | N | K |

TABLE 5B
Adenosine Deaminase Variants. Residue positions in the E. coli TadA variant
(TadA*) are indicated. Alterations are referenced to TadA*7.10 (first row).

| | 23 | 36 | 48 | 51 | 76 | 82 | 84 | 106 | 108 | 123 | 146 | 147 | 152 | 154 | 155 | 156 | 157 | 166 |
|---|---|---|---|---|---|---|---|---|---|---|---|---|---|---|---|---|---|---|
| TadA*7.10 | R | L | A | L | I | V | F | V | N | Y | C | Y | P | Q | V | F | N | T |
| TadA*8.1 | | | | | | | | | | | | T | | | | | | |
| TadA*8.2 | | | | | | | | | | | | R | | | | | | |
| TadA*8.3 | | | | | | | | | | | | | | S | | | | |
| TadA*8.4 | | | | | | | | | | H | | | | | | | | |
| TadA*8.5 | | | | | | S | | | | | | | | | | | | |
| TadA*8.6 | | | | | | | | | | | | | | | | | | R |
| TadA*8.7 | | | | | | | | | | | | | | R | | | | |
| TadA*8.8 | | | | | | | | | | H | | R | | R | | | | |
| TadA*8.9 | | | | | Y | | | | | | | R | | R | | | | |
| TadA*8.10 | | | | | | | | | | | | R | | R | | | | R |
| TadA*8.11 | | | | | | | | | | | | T | | R | | | | |
| TadA*8.12 | | | | | | | | | | | | T | | S | | | | |
| TadA*8.13 | | | | | Y | | | | | H | | R | | R | | | | |
| TadA*8.14 | | | | | Y | S | | | | | | | | | | | | |
| TadA*8.15 | | | | | | S | | | | | | R | | | | | | |
| TadA*8.16 | | | | | | S | | | | H | | R | | | | | | |
| TadA*8.17 | | | | | | S | | | | | | | | R | | | | |
| TadA*8.18 | | | | | | S | | | | H | | | | R | | | | |
| TadA*8.19 | | | | | | S | | | | H | | R | | R | | | | |
| TadA*8.20 | | | | | Y | S | | | | H | | R | | R | | | | |
| TadA*8.21 | | | | | | | | | | | | R | | S | | | | |
| TadA*8.22 | | | | | | S | | | | | | | | S | | | | |
| TadA*8.23 | | | | | | S | | | | H | | | | | | | | |
| TadA*8.24 | | | | | | S | | | | H | | T | | | | | | |

TABLE 5C
Adenosine Deaminase Variants. Alterations are referenced to
TadA*7.10. Additional details of TadA*9 adenosine deaminases
are described in International PCT Application No. PCT/US2020/
049975, which is incorporated herein by reference in its
entirety for all purposes.

| TadA*9 | |
|---|---|
| Description | Alterations |
| TadA*9.1 | E25F, V82S, Y123H, T133K, Y147R, Q154R |
| TadA*9.2 | E25F, V82S, Y123H, Y147R, Q154R |
| TadA*9.3 | V82S, Y123H, P124W, Y147R, Q154R |
| TadA*9.4 | L51W, V82S, Y123H, C146R, Y147R, Q154R |
| TadA*9.5 | P54C, V82S, Y123H, Y147R, Q154R |
| TadA*9.6 | Y73S, V82S, Y123H, Y147R, Q154R |
| TadA*9.7 | N38G, V82T, Y123H, Y147R, Q154R |
| TadA*9.8 | R23H, V82S, Y123H, Y147R, Q154R |
| TadA*9.9 | R21N, V82S, Y123H, Y147R, Q154R |
| TadA*9.10 | V82S, Y123H, Y147R, Q154R, A158K |
| TadA*9.11 | N72K, V82S, Y123H, D139L, Y147R, Q154R, |
| TadA*9.12 | E25F, V82S, Y123H, D139M, Y147R, Q154R |
| TadA*9.13 | M70V, V82S, M94V, Y123H, Y147R, Q154R |
| TadA*9.14 | Q71M, V82S, Y123H, Y147R, Q154R |
| TadA*9.15 | E25F, V82S, Y123H, T133K, Y147R, Q154R |
| TadA*9.16 | E25F, V82S, Y123H, Y147R, Q154R |
| TadA*9.17 | V82S, Y123H, P124W, Y147R, Q154R |
| TadA*9.18 | L51W, V82S, Y123H, C146R, Y147R, Q154R |
| TadA*9.19 | P54C, V82S, Y123H, Y147R, Q154R |
| TadA*9.2 | Y73S, V82S, Y123H, Y147R, Q154R |
| TadA*9.21 | N38G, V82T, Y123H, Y147R, Q154R |
| TadA*9.22 | R23H, V82S, Y123H, Y147R, Q154R |
| TadA*9.23 | R21N, V82S, Y123H, Y147R, Q154R |
| TadA*9.24 | V82S, Y123H, Y147R, Q154R, A158K |
| TadA*9.25 | N72K, V82S, Y123H, D139L, Y147R, Q154R, |
| TadA*9.26 | E25F, V82S, Y123H, D139M, Y147R, Q154R |
| TadA*9.27 | M70V, V82S, M94V, Y123H, Y147R, Q154R |
| TadA*9.28 | Q71M, V82S, Y123H, Y147R, Q154R |
| TadA*9.29 | E25F_I76Y_V82S_Y123H_Y147R_Q154R |
| TadA*9.30 | I76Y_V82T_Y123H_Y147R_Q154R |
| TadA*9.31 | N38G_I76Y_V82S_Y123H_Y147R_Q154R |
| TadA*9.32 | N38G_I76Y_V82T_Y123H_Y147R_Q154R |
| TadA*9.33 | R23H_I76Y_V82S_Y123H_Y147R_Q154R |
| TadA*9.34 | P54C_I76Y_V82S_Y123H_Y147R_Q154R |
| TadA*9.35 | R21N_I76Y_V82S_Y123H_Y147R_Q154R |
| TadA*9.36 | I76Y_V82S_Y123H_D138M_Y147R_Q154R |
| TadA*9.37 | Y72S_I76Y_V82S_Y123H_Y147R_Q154R |
| TadA*9.38 | E25F_I76Y_V82S_Y123H_Y147R_Q154R |
| TadA*9.39 | I76Y_V82T_Y123H_Y147R_Q154R |
| TadA*9.40 | N38G_I76Y_V82S_Y123H_Y147R_Q154R |
| TadA*9.41 | N38G_I76Y_V82T_Y123H_Y147R_Q154R |
| TadA*9.42 | R23H_I76Y_V82S_Y123H_Y147R_Q154R |
| TadA*9.43 | P54C_I76Y_V82S_Y123H_Y147R_Q154R |
| TadA*9.44 | R21N_I76Y_V82S_Y123H_Y147R_Q154R |
| TadA*9.45 | I76Y_V82S_Y123H_D138M_Y147R_Q154R |
| TadA*9.46 | Y72S_I76Y_V82S_Y123H_Y147R_Q154R |
| TadA*9.47 | N72K V82S, Y123H, Y147R, Q154R |
| TadA*9.48 | Q71M_V82S, Y123H, Y147R, Q154R |
| TadA*9.49 | M70V, V82S, M94V, Y123H, Y147R, Q154R |
| TadA*9.50 | V82S, Y123H, T133K, Y147R, Q154R |
| TadA*9.51 | V82S, Y123H, T133K, Y147R, Q154R, A158K |
| TadA*9.52 | M70V, Q71M, N72K, V82S, Y123H, Y147R, Q154R |
| TadA*9.53 | N72K V82S, Y123H, Y147R, Q154R |
| TadA*9.54 | Q71M_V82S, Y123H, Y147R, Q154R |
| TadA*9.55 | M70V, V82S, M94V, Y123H, Y147R, Q154R |
| TadA*9.56 | V82S, Y123H, T133K, Y147R, Q154R |
| TadA*9.57 | V82S, Y123H, T133K, Y147R, Q154R, A158K |
| TadA*9.58 | M70V, Q71M, N72K, V82S, Y123H, Y147R, Q154R |

[0215] In some embodiments, the adenosine deaminase comprises one or more of M1I, S2A, S2E, V4D, V4E, V4M, F6S, H8E, H8Y, E9Y, M12S, R13H, R13I, R13Y, T17L, T17S, L18A, L18E, A19N, R21N, K20K, K20R, R21A, G22P, W23D, R23H, W23G, W23Q, W23L, W23R, D24E, D24G, E25F, E25M, E25D, E25A, E25G, E25R, E25V, E25S, E25Y, R26D, R26E, R26G, R26N, R26Q, R26C, R26L, R26K, R26W, E27V, E27D, P29V, V30G, L34S, L34V, L36H, H36L, H36N, N37N, N37T, N37S, N38G, N38R, W45A, W45L, W45N, N46N, R46W, R46F, R46Q, R46M, R47A, R47Q, R47F, R47K, R47P, R47W, R47M, P48T, P48L, P48A, P48I, P48S, I49G, I49H, I49V, I49F, I49H, G50L, R51H, R51L, R51N, L51W, R51Y, H52D, H52Y, D53P, P54C, P54T, A55H, T55A, A56E, A56S, E59A, E59G, E591, E59Q, E59W, M61A, M61I, M61L, M61V, L63S, L63V, Q65V, G66C, G67D, G67L, G67V, L68Q, M70H, M70Q, L84F, M70V, M70L, E70A, M70V, Q71M, Q71N, Q71L, Q71R, N72A, N72K, N72S, N72D, N72Y, Y73G, Y73I, Y73K, Y73R, Y73S, R74A, R74Q, R74G, R74K, R74L, R74N, I76D, I76F, 1761, 176N, I76T, I76Y, D77G, A78I, T79M, L80M, L80Y, V82A, V82S, V82G, V82T, L84E, L84F, L84Y, E85K, E85G, E85P, E85S, S87C, S87L, S87V, V88A, V88M, C90S, A91A, A91G, A91S, A91V, A91T, G92T, A93I, M94A, M94V, M94L, M94I, M94H, I95S, I95G, I95L, I95H, I95V, H96A, H96L, H96R, H96S, S97C, S97G, S97I, S97M, S97R, S97S, R98K, R98I, R98N, R98Q, G100R, G100V, R101V, R101R, V102A, V102F, V1021, V102V, D103A, F104G, D104N, F104V, F1041, F104L, A106T, V106Q, V106F, V106W, V106M, A106A, A106Q, A106F, A106G, A106W, A106M, A106V, A106R, R107C, R107G, R107P, R107K, R107A, R107N, R107W, R107H, R107S, D108N, D108F, D108G, D108V, D108A, D108Y, D108H, D108I, D108K, D108L, D108M, D108Q, N108Q, N108F, N108W, N108M, N108K, D108K, D108F, D108M, D108Q, D108R, D108W, D108S, A109H, A109K, A109R, A109S, A109T, A109V, K110G, K110H, K110I, K110R, K110T, T111A, T111G, T111H, T111R, G112A, A114G, A114H, A114V, G115S, L117M, L117N, L117V, M118D, M118G, M118K, M118N, M118V, D119L, D119N, D119S, D119V, V120H, V120L, H122H, H122N, H122P, H122R, H122S, H122Y, H123C, H123G, H123P, H123V, H123Y, Y123H, P124G, P1241, P124L, P124W, G125H, G125I, G125A, G125M, G125K, M126D, M126H, M126K, M126I, M126N, M1260, M126S, M126Y, N127H, N127S, N127D, N127K, N127R, H128R, R129H, R129Q, R129V, R1291, R129E, R129V, 11321, 1132F, T133V, T133E, T133G, T133K, E134A, E134E, E134G, E1341, G135G, G135V, I136G, I136L, I136T, I137A, I137D, I137E, L137M, I137S, A138D, A138E, A138G, S138A, A138N, A138S, A138T, A138V, A138Y, D139E, D139I, D139C, D139L, D139M, E140A, E140C, E140L, E140R, A142N, A142D, A142G, A142A, A142L, A142S, A142T, A142N, A142S, A142V, A143D, A143E, A143G, A143D, A143G, A143E, A143L, A143W, A143M, A143S, A143Q, A143R, C146R, S146A, S146C, S146D, S146F, S146R, S146T, D147D, D147L, D147F, D147G, D147Y, Y147T, Y147R, Y147D, D147R, F148L, F148F, F148R, F148Y, F149C, F149M, F149R, F149Y, M151F, M151P, M151R, M151V, R152C, R152F, R152H, R152P, R152R, R153C, R153Q, R153R, R153V, Q154E, Q154H, Q154M, Q154R, Q154L, Q154S, Q154V, E155F, E155G, E1551, E155K, E155P, E155V, E155D, 1156A, 1156F, 1156D, 1156K, 1156N, 1156R, 1156Y, E157A, E157F, E1571, E157P, E157T, E157V, N157K, K157N, K157R, A158Q, A158K, A158V, Q159F, Q159K, Q159L, Q159N, K160A, K160S, K160E, K160K, K160N, K1611, K161A, K161N, K161Q, K161S, K161T, A162D, A162Q, R162H, R162P, A162S, Q163G, Q163H, Q163N, Q163R, S164I, S164R, S164Y, S165A, S165D, S165I, S165T, S165Y, T166D, T166K, T166I, T166N, T166P, T166R, D167S and/or D167N mutation in a TadA reference sequence (e.g., TadA*7.10,ecTadA, or TadA8e), and any alternative mutation at the corresponding position, or any substitution from R26, W23, E27, H36, R47, P48, R51, H52, R74, 176, V82, V88, M94, I95, H96, A106, D108, A109, K110, T111, A114, D119, H122, H123, M126, N127, A142, S146, D147, F149, R152, Q154, E155, 1156, E157, K161, T166, and/or D167, with respect to a TadA reference sequence, or a substitution of 2-50 amino acids in a TadA reference sequence, which may be selected from W23R, E27D, H36L, R47K, P48A, R51H, R51L, 176F, 176Y, V82S, A106V, D108G, A109S, K110R, T111H, A114V, D119N, H122R, H122N, H123Y, M126I, N127K, S146C, D147R, R152P, Q154R, E155V, 1156F, K157N, K161N, T166I, and D167N, or one or more corresponding mutations in another adenosine deaminase. Additional mutations are described in U.S. Patent Application Publication No. 2022/0307003 A1 and International Patent Application Publications No. WO 2023/288304 A2 and WO 2023/034959 A2, the disclosures of which are incorporated herein by reference in their entirety for all purposes.

[0216] In embodiments, a variant of TadA*7.10 comprises one or more alterations selected from any of those alterations provided herein.

[0217] In particular embodiments, an adenosine deaminase heterodimer comprises a TadA*8 domain and an adenosine deaminase domain selected from Staphylococcus aureus (S. aureus) TadA, Bacillus subtilis (B. subtilis) TadA, Salmonella typhimurium (S. typhimurium) TadA, Shewanella putrefaciens (S. putrefaciens) TadA, Haemophilus influenzae F3031 (H. influenzae) TadA, Caulobacter crescentus (C. crescentus) TadA, Geobacter sulfurreducens (G. sulfurreducens) TadA, or TadA*7.10.

[0218] In some embodiments, the TadA*8 is a variant as shown in Table 5D. Table 5D shows certain amino acid position numbers in the TadA amino acid sequence and the amino acids present in those positions in the TadA-7.10 adenosine deaminase. Table 5D also shows amino acid changes in TadA variants relative to TadA-7.10 following phage-assisted non-continuous evolution (PANCE) and phage-assisted continuous evolution (PACE), as described in M. Richter et al., 2020, Nature Biotechnology, doi.org/10.1038/s41587-020-0453-z, the entire contents of which are incorporated by reference herein. In some embodiments, the TadA*8 is TadA*8a, TadA*8b, TadA*8c, TadA*8d, or TadA*8e. In some embodiments, the TadA*8 is TadA*8e. In one embodiment, an adenosine deaminase is a TadA*8 that comprises or consists essentially of SEQ ID NO: 316 or a fragment thereof having adenosine deaminase activity.

TABLE 5D
Select TadA*8 Variants

| | | TadA amino acid number | | | | | | | | | |
|---|---|---|---|---|---|---|---|---|---|---|---|
| | TadA | 26 | 88 | 109 | 111 | 119 | 122 | 147 | 149 | 166 | 167 |
| | TadA-7.10 | R | V | A | T | D | H | Y | F | T | D |
| PANCE 1 | | | | | R | | | | | | |
| PANCE 2 | | | | S/T | R | | | | | | |
| PACE | TadA-8a | C | | S | R | N | N | D | Y | I | N |
| | TadA-8b | | A | S | R | N | N | | Y | I | N |
| | TadA-8c | C | | S | R | N | N | | Y | I | N |
| | TadA-8d | | A | | R | N | | | Y | | |
| | TadA-8e | | | S | R | N | N | D | Y | I | N |

[0219] In some embodiments, the TadA variant is a variant as shown in Table 5E. Table 5E shows certain amino acid position numbers in the TadA amino acid sequence and the amino acids present in those positions in the TadA*7.10 adenosine deaminase. In some embodiments, the TadA variant is MSP605, MSP680, MSP823, MSP824, MSP825, MSP827, MSP828, or MSP829. In some embodiments, the TadA variant is MSP828. In some embodiments, the TadA variant is MSP829.

TABLE 5E
TadA Variants

| | TadA Amino Acid Number | | | | | | | |
|---|---|---|---|---|---|---|---|---|
| Variant | 36 | 76 | 82 | 147 | 149 | 154 | 157 | 167 |
| TadA-7.10 | L | I | V | Y | F | Q | N | D |
| MSP605 | | | G | T | | S | | |
| MSP680 | | Y | G | T | | S | | |
| MSP823 | H | | G | T | | S | K | |
| MSP824 | | | G | D | Y | S | | N |
| MSP825 | H | | G | D | Y | S | K | N |
| MSP827 | H | Y | G | T | | S | K | |
| MSP828 | | Y | G | D | Y | S | | N |
| MSP829 | H | Y | G | D | Y | S | K | N |

[0220] In particular embodiments, the fusion proteins or complexes comprise a single (e.g., provided as a monomer) TadA* (e.g., TadA*8 or TadA*9). Throughout the present disclosure, an adenosine deaminase base editor that comprises a single TadA* domain is indicates using the terminology ABEm or ABE #m, where “#” is an identifying number (e.g., ABE8.20m), where “m” indicates “monomer.” In some embodiments, the TadA* is linked to a Cas9 nickase. In some embodiments, the fusion proteins or complexes of the disclosure comprise as a heterodimer of a wild-type TadA (TadA(wt)) linked to a TadA*. Throughout the present disclosure, an adenosine deaminase base editor that comprises a single TadA* domain and a TadA(wt) domain is indicates using the terminology ABEd or ABE #d, where “#” is an identifying number (e.g., ABE8.20d), where “d” indicates “dimer.” In other embodiments, the fusion proteins or complexes of the disclosure comprise as a heterodimer of a TadA*7.10 linked to a TadA*. In some embodiments, the base editor is ABE8 comprising a TadA* variant monomer. In some embodiments, the base editor is ABE comprising a heterodimer of a TadA* and a TadA(wt). In some embodiments, the base editor is ABE comprising a heterodimer of a TadA* and TadA*7.10. In some embodiments, the base editor is ABE comprising a heterodimer of a TadA*. In some embodiments, the TadA* is selected from Tables 5A-5E.

[0221] In some embodiments, the adenosine deaminase is expressed as a monomer. In other embodiments, the adenosine deaminase is expressed as a heterodimer. In some embodiments, the deaminase or other polypeptide sequence lacks a methionine, for example when included as a component of a fusion protein. This can alter the numbering of positions. However, the skilled person will understand that such corresponding mutations refer to the same mutation.

[0222] Any of the mutations provided herein and any additional mutations (e.g., based on the ecTadA amino acid sequence) can be introduced into any other adenosine deaminases. Any of the mutations provided herein can be made individually or in any combination in a TadA reference sequence or another adenosine deaminase (e.g., ecTadA).

[0223] Details of A to G nucleobase editing proteins are described in International PCT Application No. PCT/US2017/045381 (WO2018/027078) and Gaudelli, N. M., et al., “Programmable base editing of A•T to G•C in genomic DNA without DNA cleavage” Nature, 551, 464-471 (2017), the entire contents of which are hereby incorporated by reference.

### Guide Polynucleotides

[0224] A polynucleotide programmable nucleotide binding domain, when in conjunction with a bound guide polynucleotide (e.g., gRNA), can specifically bind to a target polynucleotide sequence (i.e., via complementary base pairing between bases of the bound guide nucleic acid and bases of the target polynucleotide sequence) and thereby localize the base editor to the target nucleic acid sequence desired to be edited. In some embodiments, the target polynucleotide sequence comprises single-stranded DNA or double-stranded DNA. In some embodiments, the target polynucleotide sequence comprises RNA. In some embodiments, the target polynucleotide sequence comprises a DNA-RNA hybrid.

[0225] In an embodiment, a guide polynucleotide described herein can be RNA or DNA. In one embodiment, the guide polynucleotide is a gRNA.

[0226] In some embodiments, the guide polynucleotide is at least one single guide RNA (“sgRNA” or “gRNA”). In some embodiments, a guide polynucleotide comprises two or more individual polynucleotides, which can interact with one another via for example complementary base pairing (e.g., a dual guide polynucleotide, dual gRNA). For example, a guide polynucleotide can comprise a CRISPR RNA (crRNA) and a trans-activating CRISPR RNA (tracrRNA) or can comprise one or more trans-activating CRISPR RNA (tracrRNA).

[0227] A guide polynucleotide may include natural or non-natural (or unnatural) nucleotides (e.g., peptide nucleic acid or nucleotide analogs). In some cases, the targeting region of a guide nucleic acid sequence (e.g., a spacer) can be at least 15, 16, 17, 18, 19, 20, 21, 22, 23, 24, 25, 26, 27, 28, 29, or 30 nucleotides in length.

[0228] In some embodiments, the methods described herein can utilize an engineered Cas protein. A guide RNA (gRNA) is a short synthetic RNA composed of a scaffold sequence necessary for Cas-binding and a user-defined ˜20 nucleotide spacer that defines the genomic target to be modified. Exemplary gRNA scaffold sequences are provided in the sequence listing as SEQ ID NOs: 317-327 and 425. Thus, a skilled artisan can change the genomic target of the Cas protein specificity is partially determined by how specific the gRNA targeting sequence is for the genomic target compared to the rest of the genome. In embodiments, the spacer is about 10, 11, 12, 13, 14, 15, 16, 17, 18, 19, 20, 22, 23, 24, 25, or more nucleotides in length. The spacer of a gRNA can be or can be about 19, 20, or 21 nucleotides in length.

[0229] A gRNA or a guide polynucleotide can target any exon or intron of a gene target. In some embodiments, a composition comprises multiple gRNAs that all target the same exon or multiple gRNAs that target different exons. An exon and/or an intron of a gene can be targeted. A gRNA or a guide polynucleotide can target a nucleic acid sequence of about 20 nucleotides or less than about 20 nucleotides (e.g., at least about 5, 10, 15, 16, 17, 18, 19, 20, 21, 22, 23, 24, 25, 30 nucleotides), or anywhere between about 1-100 nucleotides (e.g., 5, 10, 15, 16, 17, 18, 19, 20, 21, 22, 23, 24, 25, 30, 40, 50, 60, 70, 80, 90, 100). A target nucleic acid sequence can be or can be about 20 bases immediately 5′ of the first nucleotide of the PAM. A gRNA can target a nucleic acid sequence. A target nucleic acid can be at least or at least about 1-10, 1-20, 1-30, 1-40, 1-50, 1-60, 1-70, 1-80, 1-90, or 1-100 nucleotides.

[0230] The guide polynucleotides can comprise standard ribonucleotides, modified ribonucleotides (e.g., pseudouridine), ribonucleotide isomers, and/or ribonucleotide analogs.

[0231] In some embodiments, a base editor system may comprise multiple guide polynucleotides, e.g., gRNAs. For example, the gRNAs may target to one or more target loci (e.g., at least 1 gRNA, at least 2 gRNA, at least 5 gRNA, at least 10 gRNA, at least 20 gRNA, at least 30 g RNA, at least 50 gRNA) comprised in a base editor system. The multiple gRNA sequences can be tandemly arranged and may be separated by a direct repeat.

### Modified Polynucleotides

[0232] To enhance expression, stability, and/or genomic/base editing efficiency, and/or reduce possible toxicity, the base editor-coding sequence (e.g., mRNA) and/or the guide polynucleotide (e.g., gRNA) can be modified to include one or more modified nucleotides and/or chemical modifications, e.g. using pseudo-uridine, 5-Methyl-cytosine, 2′-O-methyl-3′-phosphonoacetate, 2′-O-methyl thioPACE (MSP), 2′-O-methyl-PACE (MP), 2′-fluoro RNA (2′-F-RNA), =constrained ethyl (S-cEt), 2′-O-methyl (‘M’), 2′-O-methyl-3′-phosphorothioate (‘MS’), 2′-O-methyl-3′-thiophosphonoacetate (‘MSP’), 5-methoxyuridine, phosphorothioate, and N1-Methylpseudouridine. Chemically protected gRNAs can enhance stability and editing efficiency in vivo and ex vivo. Methods for using chemically modified mRNAs and guide RNAs are known in the art and described, for example, by Jiang et al., Chemical modifications of adenine base editor mRNA and guide RNA expand its application scope. Nat Commun 11, 1979 (2020). doi.org/10.1038/s41467-020-15892-8, Callum et al., N1-Methylpseudouridine substitution enhances the performance of synthetic mRNA switches in cells, Nucleic Acids Research, Volume 48, Issue 6, 6 Apr. 2020, Page e35, and Andries et al., Journal of Controlled Release, Volume 217, 10 Nov. 2015, Pages 337-344, each of which is incorporated herein by reference in its entirety.

[0233] In some embodiments, the guide polynucleotide comprises one or more modified nucleotides at the 5′ end and/or the 3′ end of the guide. In some embodiments, the guide polynucleotide comprises two, three, four or more modified nucleosides at the 5′ end and/or the 3′ end of the guide. In some embodiments, the guide polynucleotide comprises two, three, four or more modified nucleosides at the 5′ end and/or the 3′ end of the guide.

[0234] In some embodiments, the guide comprises at least about 50%-75% modified nucleotides. In some embodiments, the guide comprises at least about 85% or more modified nucleotides. In some embodiments, at least about 1-5 nucleotides at the 5′ end of the gRNA are modified and at least about 1-5 nucleotides at the 3′ end of the gRNA are modified. In some embodiments, at least about 3-5 contiguous nucleotides at each of the 5′ and 3′ termini of the gRNA are modified. In some embodiments, at least about 20% of the nucleotides present in a direct repeat or anti-direct repeat are modified. In some embodiments, at least about 50% of the nucleotides present in a direct repeat or anti-direct repeat are modified. In some embodiments, at least about 50-75% of the nucleotides present in a direct repeat or anti-direct repeat are modified. In some embodiments, at least about 100 of the nucleotides present in a direct repeat or anti-direct repeat are modified. In some embodiments, at least about 20% or more of the nucleotides present in a hairpin present in the gRNA scaffold are modified. In some embodiments, at least about 50% or more of the nucleotides present in a hairpin present in the gRNA scaffold are modified. In some embodiments, the guide comprises a variable length spacer. In some embodiments, the guide comprises a 20-40 nucleotide spacer. In some embodiments, the guide comprises a spacer comprising at least about 20-25 nucleotides or at least about 30-35 nucleotides. In some embodiments, the spacer comprises modified nucleotides. In some embodiments, the guide comprises two or more of the following:
[0235] at least about 1-5 nucleotides at the 5′ end of the gRNA are modified and at least about 1-5 nucleotides at the 3′ end of the gRNA are modified;
[0236] at least about 20% of the nucleotides present in a direct repeat or anti-direct repeat are modified;
[0237] at least about 50-75% of the nucleotides present in a direct repeat or anti-direct repeat are modified;
[0238] at least about 20% or more of the nucleotides present in a hairpin present in the gRNA scaffold are modified;
[0239] a variable length spacer; and
[0240] a spacer comprising modified nucleotides.

[0241] In embodiments, the gRNA contains numerous modified nucleotides and/or chemical modifications (“heavy mods”). Such heavy mods can increase base editing ˜2 fold in vivo or in vitro. In embodiments, the gRNA comprises 2′-O-methyl or phosphorothioate modifications. In an embodiment, the gRNA comprises 2′-O-methyl and phosphorothioate modifications. In an embodiment, the modifications increase base editing by at least about 2 fold.

[0242] A guide polynucleotide can comprise one or more modifications to provide a nucleic acid with a new or enhanced feature. A guide polynucleotide can comprise a nucleic acid affinity tag. A guide polynucleotide can comprise synthetic nucleotide, synthetic nucleotide analog, nucleotide derivatives, and/or modified nucleotides.

[0243] A gRNA or a guide polynucleotide can also be modified by 5′ adenylate, 5′ guanosine-triphosphate cap, 5′ N7-Methylguanosine-triphosphate cap, 5′ triphosphate cap, 3′ phosphate, 3′ thiophosphate, 5′ phosphate, 5′ thiophosphate, Cis-Syn thymidine dimer, trimers, C12 spacer, C3 spacer, C6 spacer, dSpacer, PC spacer, rSpacer, Spacer 18, Spacer 9, 3′-3′ modifications, 2′-O-methyl thioPACE (MSP), 2′-O-methyl-PACE (MP), and constrained ethyl (S-cEt), 5′-5′ modifications, abasic, acridine, azobenzene, biotin, biotin BB, biotin TEG, cholesteryl TEG, desthiobiotin TEG, DNP TEG, DNP-X, DOTA, dT-Biotin, dual biotin, PC biotin, psoralen C2, psoralen C6, TINA, 3′ DABCYL, black hole quencher 1, black hole quencher 2, DABCYL SE, dT-DABCYL, IRDye QC-1, QSY-21, QSY-35, QSY-7, QSY-9, carboxyl linker, thiol linkers, 2′-deoxyribonucleoside analog purine, 2′-deoxyribonucleoside analog pyrimidine, ribonucleoside analog, 2′-O-methyl ribonucleoside analog, sugar modified analogs, wobble/universal bases, fluorescent dye label, 2′-fluoro RNA, 2′-O-methyl RNA, methylphosphonate, phosphodiester DNA, phosphodiester RNA, phosphothioate DNA, phosphorothioate RNA, UNA, pseudouridine-5′-triphosphate, 5′-methylcytidine-5′-triphosphate, or any combination thereof.

[0244] In some cases, a phosphorothioate enhanced RNA gRNA can inhibit RNase A, RNase T1, calf serum nucleases, or any combinations thereof. These properties can allow the use of PS-RNA gRNAs to be used in applications where exposure to nucleases is of high probability in vivo or in vitro. For example, phosphorothioate (PS) bonds can be introduced between the last 3-5 nucleotides at the 5′- or 3′-end of a gRNA which can inhibit exonuclease degradation.

[0245] In some cases, phosphorothioate bonds can be added throughout an entire gRNA to reduce attack by endonucleases.

### Fusion Proteins or Complexes Comprising a Nuclear Localization Sequence (NLS)

[0246] In some embodiments, the fusion proteins or complexes provided herein further comprise one or more (e.g., 2, 3, 4, 5) nuclear targeting sequences, for example a nuclear localization sequence (NLS). In one embodiment, a bipartite NLS is used. In some embodiments, a NLS comprises an amino acid sequence that facilitates the importation of a protein, that comprises an NLS, into the cell nucleus (e.g., by nuclear transport). In some embodiments, the NLS is fused to the N-terminus or the C-terminus of the fusion protein. In some embodiments, the NLS is fused to the C-terminus or N-terminus of an nCas9 domain or a dCas9 domain. In some embodiments, the NLS is fused to the N-terminus or C-terminus of the Cas12 domain. In some embodiments, the NLS is fused to the N-terminus or C-terminus of the adenosine deaminase. In some embodiments, the NLS is fused to the fusion protein via one or more linkers. In some embodiments, the NLS is fused to the fusion protein without a linker. In some embodiments, the NLS comprises an amino acid sequence of any one of the NLS sequences provided or referenced herein. Additional nuclear localization sequences are known in the art and would be apparent to the skilled artisan. For example, NLS sequences are described in Plank et al., PCT/EP2000/011690, the contents of which are incorporated herein by reference for their disclosure of exemplary nuclear localization sequences.

[0247] In some embodiments, the NLS is present in a linker or the NLS is flanked by linkers, for example described herein. A bipartite NLS comprises two basic amino acid clusters, which are separated by a relatively short spacer sequence (hence bipartite—2 parts, while monopartite NLSs are not). The NLS of nucleoplasmin, KR [PAATKKAGQA]KKKK (SEQ ID NO: 191), is the prototype of the ubiquitous bipartite signal: two clusters of basic amino acids, separated by a spacer of about 10 amino acids. The sequence of an exemplary bipartite NLS follows:

(SEQ ID NO: 328)
PKKKRKVEGADKRTADGSEFESPKKKRKV.

[0248] In some embodiments, any of the fusion proteins or complexes provided herein comprise an NLS comprising the amino acid sequence EGADKRTADGSEFESPKKKRKV (amino acids 8 to 29 of SEQ ID NO 328). In some embodiments, any of the adenosine base editors provided herein, for example ABE Variant A, ABE Variant B, ABE Variant C, ABE Variant D, ABE Variant E, ABE Variant F, ABE Variant G, ABE Variant H, ABE Variant I, ABE Variant J, ABE Variant K, or ABE Variant D comprise an NLS comprising the amino acid sequence EGADKRTADGSEFESPKKKRKV (amino acids 8 to 29 of SEQ ID NO: 328). In some embodiments, the NLS is at a C-terminal portion of the adenosine base editor. In some embodiments, the NLS is at the C-terminus of the adenosine base editor.

### Additional Domains

[0249] A base editor described herein can include any domain which helps to facilitate the nucleobase editing, modification or altering of a nucleobase of a polynucleotide. In some embodiments, a base editor comprises a polynucleotide programmable nucleotide binding domain (e.g., Cas9), a nucleobase editing domain (e.g., deaminase domain), and one or more additional domains. In some embodiments, the additional domain can facilitate enzymatic or catalytic functions of the base editor, binding functions of the base editor, or be inhibitors of cellular machinery (e.g., enzymes) that could interfere with the desired base editing result. In some embodiments, a base editor comprises a nuclease, a nickase, a recombinase, a deaminase, a methyltransferase, a methylase, an acetylase, an acetyltransferase, a transcriptional activator, or a transcriptional repressor domain.

[0250] In some embodiments, a base editor comprises an uracil glycosylase inhibitor (UGI) domain. In some cases, a base editor is expressed in a cell in trans with a UGI polypeptide. In some embodiments, cellular DNA repair response to the presence of U:G heteroduplex DNA can be responsible for a decrease in nucleobase editing efficiency in cells. In such embodiments, uracil DNA glycosylase (UDG) can catalyze removal of U from DNA in cells, which can initiate base excision repair (BER), mostly resulting in reversion of the U:G pair to a C:G pair. In such embodiments, BER can be inhibited in base editors comprising one or more domains that bind the single strand, block the edited base, inhibit UGI, inhibit BER, protect the edited base, and/or promote repairing of the non-edited strand. Thus, this disclosure contemplates a base editor fusion protein or complex comprising a UGI domain and/or a uracil stabilizing protein (USP) domain.

### Base Editor System

[0251] Provided herein are systems, compositions, and methods for editing a nucleobase using a base editor system. In some embodiments, the base editor system comprises (1) a base editor (BE) comprising a polynucleotide programmable nucleotide binding domain and a nucleobase editing domain (e.g., a deaminase domain) for editing the nucleobase; and (2) a guide polynucleotide (e.g., guide RNA) in conjunction with the polynucleotide programmable nucleotide binding domain. In some embodiments, the base editor system is an adenosine base editor (ABE). In some embodiments, the polynucleotide programmable nucleotide binding domain is a polynucleotide programmable DNA or RNA binding domain. In some embodiments, the nucleobase editing domain is a deaminase domain. In some embodiments, a deaminase domain can be an adenine deaminase or an adenosine deaminase. In some embodiments, the adenosine base editor can deaminate adenine in DNA.

[0252] Use of the base editor system provided herein comprises the steps of: (a) contacting a target nucleotide sequence of a polynucleotide (e.g., double- or single stranded DNA or RNA) of a subject with a base editor system comprising a nucleobase editor (e.g., an adenosine base editor) and a guide polynucleotide (e.g., gRNA), wherein the target nucleotide sequence comprises a targeted nucleobase pair; (b) inducing strand separation of said target region; (c) converting a first nucleobase of said target nucleobase pair in a single strand of the target region to a second nucleobase; and (d) cutting no more than one strand of said target region, where a third nucleobase complementary to the first nucleobase base is replaced by a fourth nucleobase complementary to the second nucleobase. It should be appreciated that in some embodiments, step (b) is omitted. In some embodiments, said targeted nucleobase pair is a plurality of nucleobase pairs in one or more genes. In some embodiments, the base editor system provided herein is capable of multiplex editing of a plurality of nucleobase pairs in one or more genes. In some embodiments, the plurality of nucleobase pairs is located in the same gene. In some embodiments, the plurality of nucleobase pairs is located in one or more genes, wherein at least one gene is located in a different locus.

[0253] The components of a base editor system (e.g., a deaminase domain, a guide RNA, and/or a polynucleotide programmable nucleotide binding domain) may be associated with each other covalently or non-covalently. For example, in some embodiments, the deaminase domain can be targeted to a target nucleotide sequence by a polynucleotide programmable nucleotide binding domain, optionally where the polynucleotide programmable nucleotide binding domain is complexed with a polynucleotide (e.g., a guide RNA). In some embodiments, a polynucleotide programmable nucleotide binding domain can be fused or linked to a deaminase domain. In some embodiments, a polynucleotide programmable nucleotide binding domain can target a deaminase domain to a target nucleotide sequence by non-covalently interacting with or associating with the deaminase domain. For example, in some embodiments, the nucleobase editing component (e.g., the deaminase component) comprises an additional heterologous portion or domain that is capable of interacting with, associating with, or capable of forming a complex with a corresponding heterologous portion, antigen, or domain that is part of a polynucleotide programmable nucleotide binding domain and/or a guide polynucleotide (e.g., a guide RNA) complexed therewith. In some embodiments, the polynucleotide programmable nucleotide binding domain, and/or a guide polynucleotide (e.g., a guide RNA) complexed therewith, comprises an additional heterologous portion or domain that is capable of interacting with, associating with, or capable of forming a complex with a corresponding heterologous portion, antigen, or domain that is part of a nucleobase editing domain (e.g., the deaminase component). In some embodiments, the additional heterologous portion may be capable of binding to, interacting with, associating with, or forming a complex with a polypeptide. In some embodiments, the additional heterologous portion may be capable of binding to, interacting with, associating with, or forming a complex with a polynucleotide. In some embodiments, the additional heterologous portion may be capable of binding to a guide polynucleotide. In some embodiments, the additional heterologous portion may be capable of binding to a polypeptide linker. In some embodiments, the additional heterologous portion is capable of binding to a polynucleotide linker. An additional heterologous portion may be a protein domain. In some embodiments, an additional heterologous portion comprises a polypeptide, such as a 22 amino acid RNA-binding domain of the lambda bacteriophage antiterminator protein N (N22p), a 2G12 IgG homodimer domain, an ABI, an antibody (e.g. an antibody that binds a component of the base editor system or a heterologous portion thereof) or fragment thereof (e.g. heavy chain domain 2 (CH2) of IgM (MHD2) or IgE (EHD2), an immunoglobulin Fc region, a heavy chain domain 3 (CH3) of IgG or IgA, a heavy chain domain 4 (CH4) of IgM or IgE, an Fab, an Fab2, miniantibodies, and/or ZIP antibodies), a barnase-barstar dimer domain, a Bcl-xL domain, a Calcineurin A (CAN) domain, a Cardiac phospholamban transmembrane pentamer domain, a collagen domain, a Com RNA binding protein domain (e.g. SfMu Com coat protein domain, and SfMu Com binding protein domain), a Cyclophilin-Fas fusion protein (CyP-Fas) domain, a Fab domain, an Fc domain, a fibritin foldon domain, an FK506 binding protein (FKBP) domain, an FKBP binding domain (FRB) domain of mTOR, a foldon domain, a fragment X domain, a GAI domain, a GID1 domain, a Glycophorin A transmembrane domain, a GyrB domain, a Halo tag, an HIV Gp41 trimerisation domain, an HPV45 oncoprotein E7 C-terminal dimer domain, a hydrophobic polypeptide, a K Homology (KH) domain, a Ku protein domain (e.g., a Ku heterodimer), a leucine zipper, a LOV domain, a mitochondrial antiviral-signaling protein CARD filament domain, an MS2 coat protein domain (MCP), a non-natural RNA aptamer ligand that binds a corresponding RNA motif/aptamer, a parathyroid hormone dimerization domain, a PP7 coat protein (PCP) domain, a PSD95-Dlgl-zo-1 (PDZ) domain, a PYL domain, a SNAP tag, a SpyCatcher moiety, a SpyTag moiety, a streptavidin domain, a streptavidin-binding protein domain, a streptavidin binding protein (SBP) domain, a telomerase Sm7 protein domain (e.g. Sm7 homoheptamer or a monomeric Sm-like protein), and/or fragments thereof. In embodiments, an additional heterologous portion comprises a polynucleotide (e.g., an RNA motif), such as an MS2 phage operator stem-loop (e.g., an MS2, an MS2 C-5 mutant, or an MS2 F-5 mutant), a non-natural RNA motif, a PP7 operator stem-loop, an SfMu phate Com stem-loop, a steril alpha motif, a telomerase Ku binding motif, a telomerase Sm7 binding motif, and/or fragments thereof. Non-limiting examples of additional heterologous portions include polypeptides with at least about 85% sequence identity to any one or more of SEQ ID NOs: 380, 382, 384, 386-388, or fragments thereof. Non-limiting examples of additional heterologous portions include polynucleotides with at least about 85% sequence identity to any one or more of SEQ ID NOs: 379, 381, 383, 385, or fragments thereof.

[0254] In some instances, components of the base editing system are associated with one another through the interaction of leucine zipper domains (e.g., SEQ ID NOs: 387 and 388). In some cases, components of the base editing system are associated with one another through polypeptide domains (e.g., FokI domains) that associate to form protein complexes containing about, at least about, or no more than about 1, 2 (i.e., dimerize), 3, 4, 5, 6, 7, 8, 9, 10 polypeptide domain units, optionally the polypeptide domains may include alterations that reduce or eliminate an activity thereof.

[0255] In some instances, components of the base editing system are associated with one another through the interaction of multimeric antibodies or fragments thereof (e.g., IgG, IgD, IgA, IgM, IgE, a heavy chain domain 2 (CH2) of IgM (MHD2) or IgE (EHD2), an immunoglobulin Fc region, a heavy chain domain 3 (CH3) of IgG or IgA, a heavy chain domain 4 (CH4) of IgM or IgE, an Fab, and an Fab2). In some instances, the antibodies are dimeric, trimeric, or tetrameric. In embodiments, the dimeric antibodies bind a polypeptide or polynucleotide component of the base editing system.

[0256] In some cases, components of the base editing system are associated with one another through the interaction of a polynucleotide-binding protein domain(s) with a polynucleotide(s). In some instances, components of the base editing system are associated with one another through the interaction of one or more polynucleotide-binding protein domains with polynucleotides that are self-complementary and/or complementary to one another so that complementary binding of the polynucleotides to one another brings into association their respective bound polynucleotide-binding protein domain(s).

[0257] In some instances, components of the base editing system are associated with one another through the interaction of a polypeptide domain(s) with a small molecule(s) (e.g., chemical inducers of dimerization (CIDs), also known as “dimerizers”). Non-limiting examples of CIDs include those disclosed in Amara, et al., “A versatile synthetic dimerizer for the regulation of protein-protein interactions,” PNAS, 94:10618-10623 (1997); and Voß, et al. “Chemically induced dimerization: reversible and spatiotemporal control of protein function in cells,” Current Opinion in Chemical Biology, 28:194-201 (2015), the disclosures of each of which are incorporated herein by reference in their entireties for all purposes. In some embodiments, the base editor inhibits base excision repair (BER) of the edited strand. In some embodiments, the base editor protects or binds the non-edited strand. In some embodiments, the base editor comprises UGI activity or USP activity. In some embodiments, the base editor comprises a catalytically inactive inosine-specific nuclease.

[0258] The base editors of the present disclosure can comprise any domain, feature or amino acid sequence which facilitates the editing of a target polynucleotide sequence. For example, in some embodiments, the base editor comprises a nuclear localization sequence (NLS). In some embodiments, an NLS of the base editor is localized between a deaminase domain and a polynucleotide programmable nucleotide binding domain. In some embodiments, an NLS of the base editor is localized C-terminal to a polynucleotide programmable nucleotide binding domain.

[0259] Protein domains included in the fusion protein can be a heterologous functional domain. Non-limiting examples of protein domains which can be included in the fusion protein include a deaminase domain (e.g., adenosine deaminase), a uracil glycosylase inhibitor (UGI) domain, epitope tags, and reporter gene sequences.

[0260] In some embodiments, the adenosine base editor (ABE) can deaminate adenine in DNA. In some embodiments, ABE is generated by replacing APOBEC1 component of BE3 with natural or engineered E. coli TadA, human ADAR2, mouse ADA, or human ADAT2. In some embodiments, ABE comprises an evolved TadA variant. In some embodiments, the base editor is ABE8.1, which comprises or consists essentially of the following sequence or a fragment thereof having adenosine deaminase activity: SEQ ID NO: 331. Other ABE8 sequences are provided in the attached sequence listing (SEQ ID NOs: 332-354).

[0261] In some embodiments, the base editor includes an adenosine deaminase variant comprising an amino acid sequence, which contains alterations relative to an ABE 7*10 reference sequence, as described herein. The term “monomer” as used in Table 6 refers to a monomeric form of TadA*7.10 comprising the alterations described. The term “heterodimer” as used in Table 6 refers to the specified wild-type E. coli TadA adenosine deaminase fused to a TadA*7.10 comprising the alterations as described.

TABLE 6
Adenosine Deaminase Base Editor Variants

| | Adenosine | |
|---|---|---|
| ABE | Deaminase | Adenosine Deaminase Description |
| ABE-605m | MSP605 | monomer_TadA*7.10 + V82G + Y147T + |
| | | Q154S |
| ABE-680m | MSP680 | monomer_TadA*7.10 + I76Y + V82G + |
| | | Y147T + Q154S |
| ABE-823m | MSP823 | monomer_TadA*7.10 + L36H + V82G + |
| | | Y147T + Q154S + N157K |
| ABE-824m | MSP824 | monomer_TadA*7.10 + V82G + Y147D + |
| | | F149Y + Q154S + D167N |
| ABE-825m | MSP825 | monomer_TadA*7.10 + L36H + V82G + |
| | | Y147D + F149Y + Q154S + N157K + D167N |
| ABE-827m | MSP827 | monomer_TadA*7.10 + L36H + I76Y + |
| | | V82G + Y147T + Q154S + N157K |
| ABE-828m | MSP828 | monomer TadA*7.10 + I76Y + V82G + |
| | | Y147D + F149Y + Q154S + D167N |
| ABE-829m | MSP829 | monomer_TadA*7.10 + L36H + I76Y + |
| | | V82G + Y147D + F149Y + Q154S + |
| | | N157K + D167N |
| ABE-605d | MSP605 | heterodimer_(WT) + (TadA*7.10 + V82G + |
| | | Y147T + Q154S) |
| ABE-680d | MSP680 | heterodimer_(WT) + (TadA*7.10 + 176Y + |
| | | V82G + Y147T + Q154S) |
| ABE-823d | MSP823 | heterodimer_(WT) + (TadA*7.10 + L36H + |
| | | V82G + Y147T + Q154S + N157K) |
| ABE-824d | MSP824 | heterodimer (WT) + (TadA*7.10 + V82G + |
| | | Y147D + F149Y + Q154S + D167N) |
| ABE-825d | MSP825 | heterodimer_(WT) + (TadA*7.10 + L36H + |
| | | V82G + Y147D + F149Y + Q154S + |
| | | N157K + D167N) |
| ABE-827d | MSP827 | heterodimer_(WT) + (TadA*7.10 + L36H + |
| | | I76Y + V82G + Y147T + Q154S + N157K) |
| ABE-828d | MSP828 | heterodimer_(WT) + (TadA*7.10 + I76Y + |
| | | V82G + Y147D + F149Y + Q154S + D167N) |
| ABE-829d | MSP829 | heterodimer_(WT) + (TadA*7.10 + L36H + |
| | | I76Y + V82G + Y147D + F149Y + Q154S + |
| | | N157K + D167N) |

[0262] In some embodiments, the base editor comprises a domain comprising all or a portion (e.g., a functional portion) of a uracil glycosylase inhibitor (UGI) or a uracil stabilizing protein (USP) domain.

### Linkers

[0263] In certain embodiments, linkers may be used to link any of the peptides or peptide domains of the disclosure. The linker may be as simple as a covalent bond, or it may be a polymeric linker many atoms in length. In certain embodiments, the linker is a polypeptide or based on amino acids. In other embodiments, the linker is not peptide-like. In certain embodiments, the linker is a covalent bond (e.g., a carbon-carbon bond, disulfide bond, carbon-heteroatom bond, etc.).

[0264] In some embodiments, any of the fusion proteins provided herein, comprise an adenosine deaminase and a Cas9 domain that are fused to each other via a linker. Various linker lengths and flexibilities between the adenosine deaminase and the Cas9 domain can be employed (e.g., ranging from very flexible linkers of the form (GGGS)ₙ (SEQ ID NO: 246), (GGGGS)ₙ (SEQ ID NO: 247), and (G)ₙ to more rigid linkers of the form (EAAAK)ₙ (SEQ ID NO: 248), (SGGS)ₙ (SEQ ID NO: 355), SGSETPGTSESATPES (SEQ ID NO: 249) (see, e.g. Guilinger J P, et al. Fusion of catalytically inactive Cas9 to FokI nuclease improves the specificity of genome modification. Nat. Biotechnol. 2014; 32(6): 577-82; the entire contents are incorporated herein by reference) and (XP)n) in order to achieve the optimal length for activity for the adenosine deaminase nucleobase editor. In some embodiments, n is 1, 2, 3, 4, 5, 6, 7, 8, 9, 10, 11, 12, 13, 14, or 15. In some embodiments, the linker comprises a (GGS)n motif, wherein n is 1, 3, or 7. In some embodiments, an adenosine deaminase and the Cas9 domain of any of the fusion proteins provided herein are fused via a linker comprising the amino acid sequence SGSETPGTSESATPES (SEQ ID NO: 249), which can also be referred to as the XTEN linker.

[0265] In some embodiments, the domains of the base editor are fused via a linker that comprises the amino acid sequence of

(SEQ ID NO: 356)
SGGSSGSETPGTSESATPESSGGS,
(SEQ ID NO: 357)
SGGSSGGSSGSETPGTSESATPESSGGSSGGS,
or
(SEQ ID NO: 358)
GGSGGSPGSPAGSPTSTEEGTSESATPESGPGTSTEPSEGSAPGSPAGS
PTSTEEGTSTEPSEGSAPGTSTEPSEGSAPGTSESATPESGPGSEPATS
GGSGGS.

[0266] In some embodiments, domains of the base editor are fused via a linker comprising the amino acid sequence SGSETPGTSESATPES (SEQ ID NO: 249), which may also be referred to as the XTEN linker. In some embodiments, a linker comprises the amino acid sequence SGGS (SEQ ID NO: 355). In some embodiments, the linker is 24 amino acids in length. In some embodiments, the linker comprises the amino acid sequence SGGSSGGSSGSETPGTSESATPES (SEQ ID NO: 359). In some embodiments, the linker is 40 amino acids in length. In some embodiments, the linker comprises the amino acid sequence: SGGSSGGSSGSETPGTSESATPESSGGSSGGSSGGSSGGS (SEQ ID NO: 360). In some embodiments, the linker is 64 amino acids in length. In some embodiments, the linker comprises the amino acid sequence: SGGSSGGSSGSETPGTSESATPESSGGSSGGSSGGSSGGSSGSETPGTSESATPESSGGSSG GS (SEQ ID NO: 361). In some embodiments, the linker is 92 amino acids in length. In some embodiments, the linker comprises the amino acid sequence:

(SEQ ID NO: 362)
PGSPAGSPTSTEEGTSESATPESGPGTSTEPSEGSAPGSPAGSPTSTEE
GTSTEPSEGSAPGTSTEPSEGSAPGTSESATPESGPGSEPATS.

[0267] In some embodiments, a linker comprises a plurality of proline residues and is 5-21, 5-14, 5-9, 5-7 amino acids in length, e.g., PAPAP (SEQ ID NO: 363), PAPAPA (SEQ ID NO: 364), PAPAPAP (SEQ ID NO: 365), PAPAPAPA (SEQ ID NO: 366), P(AP)4 (SEQ ID NO: 367), P(AP)7 (SEQ ID NO: 368), P(AP)10 (SEQ ID NO: 369) (see, e.g., Tan J, Zhang F, Karcher D, Bock R. Engineering of high-precision base editors for site-specific single nucleotide replacement. Nat Commun. 2019 Jan. 25; 10(1):439; the entire contents are incorporated herein by reference). Such proline-rich linkers are also termed “rigid” linkers.

Nucleic Acid Programmable DNA Binding Proteins with Guide RNAs

[0268] Provided herein are compositions and methods for base editing in cells. Further provided herein are compositions comprising a guide polynucleotide sequence, e.g., a guide RNA sequence, or a combination of 2, 3, 4, 5, 6, 7, 8, 9, 10, 11, 12, 13, 14, 15, 16, 17, 18, 19, 20, or more guide RNAs as provided herein. In some embodiments, a composition for base editing as provided herein further comprises a polynucleotide that encodes a base editor, e.g., a C-base editor or an A-base editor. For example, a composition for base editing may comprise a mRNA sequence encoding a BE, a BE4, an ABE, and a combination of one or more guide RNAs as provided. A composition for base editing may comprise a base editor polypeptide and a combination of one or more of any guide RNAs provided herein. Such a composition may be used to effect base editing in a cell through different delivery approaches, for example, electroporation, nucleofection, viral transduction or transfection. In some embodiments, the composition for base editing comprises an mRNA sequence that encodes a base editor and a combination of one or more guide RNA sequences provided herein for electroporation.

[0269] Some aspects of this disclosure provide systems comprising any of the fusion proteins or complexes provided herein, and a guide RNA bound to a nucleic acid programmable DNA binding protein (napDNAbp) domain (e.g., a Cas9 (e.g., a dCas9, a nuclease active Cas9, or a Cas9 nickase) or Cas12) of the fusion protein or complex. These complexes are also termed ribonucleoproteins (RNPs). In some embodiments, the guide nucleic acid (e.g., guide RNA) is from 15-100 nucleotides long and comprises a sequence of at least 10 contiguous nucleotides that is complementary to a target sequence. In some embodiments, the target sequence is a DNA sequence. In some embodiments, the target sequence is an RNA sequence. In some embodiments, the target sequence is a sequence in the genome of a bacteria, yeast, fungi, insect, plant, or animal. In some embodiments, the target sequence is a sequence in the genome of a human. In some embodiments, the 3′ end of the target sequence is immediately adjacent to a canonical PAM sequence (NGG). In some embodiments, the 3′ end of the target sequence is immediately adjacent to a non-canonical PAM sequence (e.g., a sequence listed in Table 3 or 5′-NAA-3′). In some embodiments, the guide nucleic acid (e.g., guide RNA) is complementary to a sequence in a gene of interest (e.g., a gene associated with a disease or disorder).

[0270] Some aspects of this disclosure provide methods of using the fusion proteins, or complexes provided herein. For example, some aspects of this disclosure provide methods comprising contacting a DNA molecule with any of the fusion proteins or complexes provided herein, and with at least one guide RNA, wherein the guide RNA is about 15-100 nucleotides long and comprises a sequence of at least 10 contiguous nucleotides that is complementary to a target sequence.

[0271] The domains of the base editor disclosed herein can be arranged in any order.

[0272] A defined target region can be a deamination window. A deamination window can be the defined region in which a base editor acts upon and deaminates a target nucleotide. In some embodiments, the deamination window is within a 2, 3, 4, 5, 6, 7, 8, 9, or 10 base regions. In some embodiments, the deamination window is 5, 6, 7, 8, 9, 10, 11, 12, 13, 14, 15, 16, 17, 18, 19, 20, 21, 22, 23, 24, or 25 bases upstream of the PAM.

[0273] The base editors of the present disclosure can comprise any domain, feature or amino acid sequence which facilitates the editing of a target polynucleotide sequence.

### Methods of Using Fusion Proteins or Complexes Comprising an Adenosine Deaminase and a Cas9 Domain

[0274] Some aspects of this disclosure provide methods of using the fusion proteins, or complexes provided herein. For example, some aspects of this disclosure provide methods comprising contacting a DNA molecule with any of the fusion proteins or complexes provided herein, and with at least one guide RNA described herein.

[0275] In some embodiments, a fusion protein or complex of the disclosure is used for editing a target gene of interest. In particular, an adenosine deaminase nucleobase editor described herein is capable of making multiple mutations within a target sequence. These mutations may affect the function of the target. For example, when an adenosine deaminase nucleobase editor is used to target a regulatory region the function of the regulatory region is altered and the expression of the downstream protein is reduced or eliminated.

### Base Editor Efficiency

[0276] In some embodiments, the purpose of the methods provided herein is to alter a gene and/or gene product via gene editing. The nucleobase editing proteins provided herein can be used for gene editing-based human therapeutics in vitro or in vivo. It will be understood by the skilled artisan that the nucleobase editing proteins provided herein, e.g., the fusion proteins or complexes comprising a polynucleotide programmable nucleotide binding domain (e.g., Cas9) and a nucleobase editing domain (e.g., an adenosine deaminase domain) can be used to edit a nucleotide from A to G.

[0277] Advantageously, base editing systems as provided herein provide genome editing without generating double-strand DNA breaks, without requiring a donor DNA template, and without inducing an excess of stochastic insertions and deletions as CRISPR may do. In some embodiments, the present disclosure provides base editors that efficiently generate an intended mutation, such as a STOP codon, in a nucleic acid (e.g., a nucleic acid within a genome of a subject) without generating a significant number of unintended mutations, such as unintended point mutations.

[0278] The base editors of the disclosure advantageously modify a specific nucleotide base encoding a protein without generating a significant proportion of indels (i.e., insertions or deletions). Such indels can lead to frame shift mutations within a coding region of a gene.

[0279] In some embodiments, the base editors provided herein are capable of generating a ratio of intended mutations to indels (i.e., intended point mutations:unintended point mutations) that is greater than 1:1. In some embodiments, the base editors provided herein are capable of generating a ratio of intended mutations to indels that is at least 1.5:1, at least 2:1, at least 2.5:1, at least 3:1, at least 3.5:1, at least 4:1, at least 4.5:1, at least 5:1, at least 5.5:1, at least 6:1, at least 6.5:1, at least 7:1, at least 7.5:1, at least 8:1, at least 10:1, at least 12:1, at least 15:1, at least 20:1, at least 25:1, at least 30:1, at least 40:1, at least 50:1, at least 100:1, at least 200:1, at least 300:1, at least 400:1, at least 500:1, at least 600:1, at least 700:1, at least 800:1, at least 900:1, or at least 1000:1, or more. The number of intended mutations and indels may be determined using any suitable method.

[0280] In some embodiments, the base editors provided herein can limit formation of indels in a region of a nucleic acid. In some embodiments, the region is at a nucleotide targeted by a base editor or a region within 2, 3, 4, 5, 6, 7, 8, 9, or 10 nucleotides of a nucleotide targeted by a base editor. In some embodiments, any of the base editors provided herein can limit the formation of indels at a region of a nucleic acid to less than 1%, less than 1.5%, less than 2%, less than 2.5%, less than 3%, less than 3.5%, less than 4%, less than 4.5%, less than 5%, less than 6%, less than 7%, less than 8%, less than 9%, less than 10%, less than 12%, less than 15%, or less than 20%.

[0281] Base editing is often referred to as a “modification”, such as, a genetic modification, a gene modification and modification of the nucleic acid sequence and is clearly understandable based on the context that the modification is a base editing modification. A base editing modification is therefore a modification at the nucleotide base level, for example as a result of the deaminase activity discussed throughout the disclosure, which then results in a change in the gene sequence and may affect the gene product.

[0282] In some embodiments, the modification, e.g., single base edit results in about or at least about a 10%, 15%, 20%, 25%, 30%, 35%, 40%, 45%, 50%, 55%, 60%, 65%, 70%, 75%, 80%, 85%, 90%, 95%, 99%, or 100% reduction, or reduction to an undetectable level, of the gene targeted expression.

[0283] The disclosure provides adenosine deaminase variants (e.g., ABE8 variants) that have increased efficiency and specificity. In particular, the adenosine deaminase variants described herein are more likely to edit a desired base within a polynucleotide and are less likely to edit bases that are not intended to be altered (e.g., “bystanders”).

[0284] In some embodiments, any of the base editing system comprising one of the ABE8 base editor variants described herein has reduced bystander editing or mutations by at least 1%, 2%, 3%, 4%, 5%, 10%, 15%, 20%, 25%, 30%, 35%, 40%, 45%, 50%, 55%, 60%, 65%, 70%, 75%, 80%, 85%, 90%, 95%, or 99% compared to a base editor system comprising an ABE7 base editor, e.g., ABE7.10.

[0285] In some embodiments, any of the ABE8 base editor variants described herein has higher base editing efficiency compared to the ABE7 base editors. In some embodiments, any of the ABE8 base editor variants described herein have at least 1%, 2%, 3%, 4%, 5%, 10%, 15%, 20%, 25%, 30%, 35%, 40%, 45%, 50%, 55%, 60%, 65%, 70%, 75%, 80%, 85%, 90%, 95%, 99%, 100%, 105%, 110%, 115%, 120%, 125%, 130%, 135%, 140%, 145%, 150%, 155%, 160%, 165%, 170%, 175%, 180%, 185%, 190%, 195%, 200%, 210%, 220%, 230%, 240%, 250%, 260%, 270%, 280%, 290%, 300%, 310%, 320%, 330%, 340%, 350%, 360%, 370%, 380%, 390%, 400%, 450%, or 500% higher base editing efficiency compared to an ABE7 base editor, e.g., ABE7.10.

[0286] The ABE8 base editor variants described herein may be delivered to a host cell via a plasmid, a vector, a LNP complex, or an mRNA. In some embodiments, any of the ABE8 base editor variants described herein is delivered to a host cell as an mRNA.

[0287] In some embodiments, the method described herein, for example, the base editing methods has minimum to no off-target effects. In some embodiments, the method described herein, for example, the base editing methods, has minimal to no chromosomal translocations.

[0288] In some embodiments, the base editing method described herein results in about 91%, 92%, 93%, 94%, 95%, 96%, 97%, 98%, 99% or 100% of a cell population that have been successfully edited.

[0289] In some embodiments, the percent of viable cells in a cell population following a base editing intervention is greater than at least 60%, 70%, 80%, or 90% of the starting cell population at the time of the base editing event. In some embodiments, the percent of viable cells in a cell population following editing is about 70%. In some embodiments, the percent of viable cells in a cell population following editing is about 75%. In some embodiments, the percent of viable cells in a cell population following editing is about 80%. In some embodiments, the percent of viable cells in a cell population as described above is about 85%. In some embodiments, the percent of viable cells in a cell population as described above is about 90%, or about 91%, 92%, 93%, 94% 95%, 96%, 97%, 98%, 99%, or 100% of the cells in the population at the time of the base editing event.

[0290] In embodiments, the cell population is a population of cells contacted with a base editor, complex, or base editor system of the present disclosure.

[0291] The number of intended mutations and indels can be determined using any suitable method, for example, as described in International PCT Application Nos. PCT/US2017/045381 (WO2018/027078) and PCT/US2016/058344 (WO2017/070632); Komor, A. C., et al., “Programmable editing of a target base in genomic DNA without double-stranded DNA cleavage” Nature 533, 420-424 (2016); Gaudelli, N. M., et al., “Programmable base editing of A•T to G•C in genomic DNA without DNA cleavage” Nature 551, 464-471 (2017); and Komor, A. C., et al., “Improved base excision repair inhibition and bacteriophage Mu Gam protein yields C:G-to-T:A base editors with higher efficiency and product purity” Science Advances 3:eaao4774 (2017); the entire contents of which are hereby incorporated by reference.

[0292] In some embodiments, to calculate indel frequencies, sequencing reads are scanned for exact matches to two 10-bp sequences that flank both sides of a window in which indels can occur. If no exact matches are located, the read is excluded from analysis. If the length of this indel window exactly matches the reference sequence the read is classified as not containing an indel. If the indel window is two or more bases longer or shorter than the reference sequence, then the sequencing read is classified as an insertion or deletion, respectively. In some embodiments, the base editors provided herein can limit formation of indels in a region of a nucleic acid. In some embodiments, the region is at a nucleotide targeted by a base editor or a region within 2, 3, 4, 5, 6, 7, 8, 9, or 10 nucleotides of a nucleotide targeted by a base editor.

### Multiplex Editing

[0293] In some embodiments, the base editor system provided herein is capable of multiplex editing of a plurality of nucleobase pairs in one or more genes or polynucleotide sequences. In some embodiments, the plurality of nucleobase pairs is located in the same gene or in one or more genes, wherein at least one gene is located in a different locus. In some embodiments, the multiplex editing comprises one or more guide polynucleotides. In some embodiments, the multiplex editing comprises one or more base editor systems. In some embodiments, the multiplex editing comprises one or more base editor systems with a single guide polynucleotide or a plurality of guide polynucleotides. In some embodiments, the multiplex editing comprises one or more guide polynucleotides with a single base editor system. It should be appreciated that the characteristics of the multiplex editing using any of the base editors as described herein can be applied to any combination of methods using any base editor provided herein. It should also be appreciated that the multiplex editing using any of the base editors as described herein can comprise a sequential editing of a plurality of nucleobase pairs.

[0294] In some embodiments, the base editor system capable of multiplex editing of a plurality of nucleobase pairs in one or more genes comprises one of ABE7, ABE8, and/or ABE9 base editors.

### Expression of Fusion Proteins or Complexes in a Host Cell

[0295] Fusion proteins or complexes of the disclosure comprising a deaminase may be expressed in virtually any host cell of interest, including but not limited to bacteria, yeast, fungi, insects, plants, and animal cells using routine methods known to the skilled artisan. For example, a DNA encoding an adenosine deaminase of the disclosure can be cloned by designing suitable primers for the upstream and downstream of CDS based on the cDNA sequence. The cloned DNA may be directly, or after digestion with a restriction enzyme when desired, or after addition of a suitable linker and/or a nuclear localization signal, ligated with a DNA encoding one or more additional components of a base editing system. The base editing system is translated in a host cell to form a complex.

[0296] A polynucleotide encoding a polypeptide described herein can be obtained by chemically synthesizing the polynucleotide, or by connecting synthesized partly overlapping oligo short chains by utilizing the PCR method and the Gibson Assembly method to construct a polynucleotide (e.g., DNA) encoding the full length thereof. The advantage of constructing a full-length polynucleotide by chemical synthesis or a combination of PCR method or Gibson Assembly method is that the codons to be used can be selected in according to the host into which the polynucleotide is to be introduced. In the expression from a heterologous DNA molecule, the protein expression level is expected to increase by converting the DNA sequence thereof to a codon highly frequently used in the host organism. Codon use data for a host cell (e.g., codon use data available at kazusa.or.jp/codon/index.html) can be used to guide codon optimization for a polynucleotide sequence encoding a polypeptide. Codons having low use frequency in the host may be converted to a codon coding the same amino acid and having high use frequency.

[0297] An expression vector containing a polynucleotide encoding a nucleic acid sequence-recognizing module and/or a nucleic acid base converting enzyme can be produced, for example, by linking the DNA to the downstream of a promoter in a suitable expression vector.

[0298] As the expression vector, Escherichia coli-derived plasmids (e.g., pBR322, pBR325, pUC12, pUC13); Bacillus subtilis-derived plasmids (e.g., pUB110, pTP5, pC194); yeast-derived plasmids (e.g., pSH19, pSH15); insect cell expression plasmids (e.g., pFast-Bac); animal cell expression plasmids (e.g., pA1-11, pXT1, pRc/CMV, pRc/RSV, pcDNAI/Neo); bacteriophages such as .lambda phage and the like; insect virus vectors such as baculovirus and the like (e.g., BmNPV, AcNPV); animal virus vectors such as retrovirus, vaccinia virus, adenovirus and the like, and the like are used.

[0299] Regarding the promoter to be used, any promoter appropriate for a host to be used for gene expression can be used. In a conventional method using double-stranded breaks, since the survival rate of the host cell sometimes decreases markedly due to the toxicity, it is desirable to increase the number of cells by the start of the induction by using an inductive promoter. However, since sufficient cell proliferation can also be afforded by expressing the nucleic acid-modifying enzyme complex of the present disclosure, a constitutive promoter can be used without limitation.

[0300] For example, when the host is an animal cell, an SR.alpha. promoter, SV40 promoter, LTR promoter, cytomegalovirus (CMV) promoter, Rous sarcoma virus (RSV) promoter, Moloney mouse leukemia virus (MoMuLV), LTR, herpes simplex virus thymidine kinase (HSV-TK) promoter, and the like can be used. Of these, CMV promoter, SR.alpha. promoter and the like may be used.

[0301] When the host is Escherichia coli, a trp promoter, lac promoter, recA promoter, .lamda.P.sub.L promoter, lpp promoter, T7 promoter, and the like can be used.

[0302] When the host is in the genus Bacillus, the SPO1 promoter, SPO2 promoter, penP promoter, and the like can be used.

[0303] When the host is a yeast, the Gal1/10 promoter, PHO5 promoter, PGK promoter, GAP promoter, ADH promoter, and the like can be used.

[0304] When the host is an insect cell, the polyhedrin promoter, P10 promoter, and the like can be used.

[0305] When the host is a plant cell, the CaMV35S promoter, CaMV19S promoter, NOS promoter, and the like can be used.

[0306] Expression vectors for use in the present disclosure, besides those mentioned above, can comprise an enhancer, a splicing signal, a terminator, a polyA addition signal, a selection marker such as drug resistance gene, an auxotrophic complementary gene and the like, a replication origin, and the like can be used.

[0307] An RNA encoding a protein domain described herein can be prepared by, for example, in vitro transcription of a nucleic acid sequence encoding any of the fusion proteins or complexes disclosed herein.

[0308] A fusion protein or complex of the disclosure can be intracellularly expressed by introducing into the cell an expression vector comprising a nucleic acid sequence encoding the fusion protein or complex.

[0309] Host cells of interest, include but are not limited to bacteria, yeast, fungi, insects, plants, and animal cells. For example, a host cell may comprise bacteria from the genus Escherichia, such as Escherichia coli K12.cndot.DH1 [Proc. Natl. Acad. Sci. USA, 60, 160 (1968)], Escherichia coli JM103 [Nucleic Acids Research, 9, 309 (1981)], Escherichia coli JA221 [Journal of Molecular Biology, 120, 517 (1978)], Escherichia coli HB101 [Journal of Molecular Biology, 41, 459 (1969)], Escherichia coli C600 [Genetics, 39, 440 (1954)] and the like.

[0310] A host cell may comprise bacteria from the genus Bacillus, for example Bacillus subtilis M1114 [Gene, 24, 255 (1983)], Bacillus subtilis 207-21 [Journal of Biochemistry, 95, 87 (1984)] and the like.

[0311] A host cell may be a yeast cell. Examples of yeast cells include Saccharomyces cerevisiae AH22, AH22R.sup.−, NA87-11A, DKD-5D, 20B-12, Schizosaccharomyces pombe NCYC1913, NCYC2036, Pichia pastoris KM71 and the like.

[0312] When the viral delivery methods utilize the virus AcNPV, cells from a cabbage armyworm larva-derived established line (Spodoptera frugiperda cell; Sf cell), MG1 cells derived from the mid-intestine of Trichoplusia ni, High Five™ cells derived from an ovary of Trichoplusia ni, Mamestra brassicae-derived cells, Estigmena acrea-derived cells and the like can be used. When the virus is BmNPV, cells of Bombyx mori-derived established line (Bombyx mori N cell; BmN cell) and the like are used. As the Sf cell, for example, Sf9 cell (ATCC CRL1711), Sf21 cell [all above, In Vivo, 13, 213-217 (1977)] and the like are used.

[0313] An insect can be any insect, for example, larva of Bombyx mori, Drosophila, cricket, and the like [Nature, 315, 592 (1985)].

[0314] Animal cells contemplated in the present disclosure include, but are not limited to, cell lines such as monkey COS-7 cells, monkey Vero cells, Chinese hamster ovary (CHO) cells, dhfr gene-deficient CHO cells, mouse L cells, mouse AtT-20 cells, mouse myeloma cells, rat GH3 cells, human FL cells and the like, pluripotent stem cells such as iPS cells, ES cells derived humans and other mammals, and primary cultured cells prepared from various tissues. Furthermore, zebrafish embryo, Xenopus oocyte, and the like can also be used.

[0315] Plant cells are also contemplated in the present disclosure. Plant cells include, but are not limited to, suspended cultured cells, callus, protoplast, leaf segment, root segment and the like prepared from various plants (e.g., grain such as rice, wheat, corn, and the like; product crops such as tomato, cucumber, eggplant and the like; garden plants such as carnations, Eustoma russellianum, and the like; and other plants such as tobacco, Arabidopsis thaliana and the like) are used.

[0316] All the above-mentioned host cells may be haploid (monoploid), or polyploid (e.g., diploid, triploid, tetraploid, etc.). Using conventional methods, mutations, in principle, introduced into only one homologous chromosome produce a heterogenous cell. Therefore, the desired phenotype is not expressed unless the mutation is dominant. For recessive mutations, acquiring a homozygous cell can be inconvenient due to labor and time requirements. In contrast, according to the present disclosure, since a mutation can be introduced into any allele on the homologous chromosome in the genome, the desired phenotype can be expressed in a single generation even in the case of recessive mutation, thereby solving the problem associated with conventional mutagenesis methods.

[0317] An expression vector can be introduced by a known method (e.g., the lysozyme method, the competent method, the PEG method, the CaCl₂) coprecipitation method, electroporation, microinjection, particle gun method, lipofection, Agrobacterium-mediated delivery, etc.) according to the kind of the host.

[0318] Escherichia coli can be transformed according to the methods described in, for example, Proc. Natl. Acad. Sci. USA, 69, 2110 (1972), Gene, 17, 107 (1982).

[0319] The genus Bacillus can be introduced into a vector according to the methods described in, for example, Molecular & General Genetics, 168, 111 (1979).

[0320] A yeast can be introduced into a vector according to the methods described in, for example, Methods in Enzymology, 194, 182-187 (1991), Proc. Natl. Acad. Sci. USA, 75, 1929 (1978).

[0321] An insect cell and an insect can be introduced into a vector according to the methods described in, for example, Bio/Technology, 6, 47-55 (1988).

[0322] A vector can be introduced into an animal cell according to the methods described in, for example, Cell Engineering additional volume 8, New Cell Engineering Experiment Protocol, 263-267 (1995) (published by Shujunsha), and Virology, 52, 456 (1973).

[0323] A cell comprising a vector can be cultured according to a known method according to the kind of the host. For example, when Escherichia coli or genus Bacillus is cultured, a liquid medium may be used as a medium to be used for the culture. The medium may contain a carbon source, nitrogen source, inorganic substance and the like necessary for the growth of the transformant. Examples of the carbon source include glucose, dextrin, soluble starch, sucrose and the like; examples of the nitrogen source include inorganic or organic substances such as ammonium salts, nitrate salts, corn steep liquor, peptone, casein, meat extract, soybean cake, potato extract and the like; and examples of the inorganic substance include calcium chloride, sodium dihydrogen phosphate, magnesium chloride and the like. The medium may contain yeast extract, vitamins, growth promoting factor and the like. The pH of the medium is between about 5 about 8 in embodiments.

[0324] As a medium for culturing Escherichia coli, for example, M9 medium containing glucose, casamino acid [Journal of Experiments in Molecular Genetics, 431-433, Cold Spring Harbor Laboratory, New York 1972] can be used. Where necessary, for example, agents such as 30-indolylacrylic acid may be added to the medium to ensure an efficient function of a promoter. Escherichia coli is cultured at generally about 15 to about 43° C. Where necessary, aeration and stirring may be performed.

[0325] The genus Bacillus is cultured at generally about 30 to about 40° C. Where necessary, aeration and stirring may be performed.

[0326] Examples of the medium for culturing yeast include Burkholder minimum medium [Proc. Natl. Acad. Sci. USA, 77, 4505 (1980)], SD medium containing 0.5% casamino acid [Proc. Natl. Acad. Sci. USA, 81, 5330 (1984)] and the like. The pH of the medium may be between about 5 to about 8. The culture is performed at generally about 20° C. to about 35° C. Where necessary, aeration and stirring may be performed.

[0327] As a medium for culturing an insect cell or insect, for example, Grace's Insect Medium [Nature, 195, 788 (1962)] containing an additive such as inactivated 10% bovine serum and the like as appropriate and the like are used. The pH of the medium is may be between about 6.2 to about 6.4. The culture is performed at generally about 27° C. Where necessary, aeration and stirring may be performed.

[0328] As a medium for culturing an animal cell, for example, minimum essential medium (MEM) containing about 5 to about 20% of fetal bovine serum [Science, 122, 501 (1952)], Dulbecco's modified Eagle medium (DMEM) [Virology, 8, 396 (1959)], RPMI 1640 medium [The Journal of the American Medical Association, 199, 519 (1967)], 199 medium [Proceeding of the Society for the Biological Medicine, 73, 1 (1950)] and the like are used. The pH of the medium may be between about 6 to about 8. The culture is performed at generally about 30° C. to about 40° C. Where necessary, aeration and stirring may be performed.

[0329] As a medium for culturing a plant cell, for example, MS medium, LS medium, B5 medium and the like are used. The pH of the medium may be between about 5-about 8. The culture is performed at generally about 20° C. to about 30° C. Where necessary, aeration and stirring may be performed.

[0330] When a higher eukaryotic cell, such as animal cell, insect cell, plant cell and the like is used as a host cell, a polynucleotide encoding a base editing system of the present disclosure (e.g., comprising an adenosine deaminase variant) is introduced into a host cell under the regulation of an inducible promoter (e.g., metallothionein promoter (induced by heavy metal ion), heat shock protein promoter (induced by heat shock), Tet-ON/Tet-OFF system promoter (induced by addition or removal of tetracycline or a derivative thereof), steroid-responsive promoter (induced by steroid hormone or a derivative thereof) etc.), the induction substance is added to the medium (or removed from the medium) at an appropriate stage to induce expression of the nucleic acid-modifying enzyme complex, culture is performed for a given period to carry out a base editing and, introduction of a mutation into a target gene, transient expression of the base editing system can be realized.

[0331] Prokaryotic cells such as Escherichia coli and the like can utilize an inducible promoter. Examples of the inducible promoter include, but are not limited to, lac promoter (induced by IPTG), cspA promoter (induced by cold shock), araBAD promoter (induced by arabinose) and the like.

[0332] Alternatively, the above-mentioned inductive promoter can also be utilized as a vector removal mechanism when higher eukaryotic cells, such as animal cell, insect cell, plant cell and the like are used as a host cell. That is, a vector is mounted with a replication origin that functions in a host cell, and a nucleic acid encoding a protein necessary for replication (e.g., SV40 on and large T antigen, oriP and EBNA-1 etc. for animal cells), of the expression of the nucleic acid encoding the protein is regulated by the above-mentioned inducible promoter. As a result, while the vector is autonomously replicable in the presence of an induction substance, when the induction substance is removed, autonomous replication is not available, and the vector naturally falls off along with cell division (autonomous replication is not possible by the addition of tetracycline and doxycycline in Tet-OFF system vector).

### Delivery Systems

### Nucleic Acid-Based Delivery of Base Editor Systems

[0333] Nucleic acid molecules encoding a base editor system according to the present disclosure can be administered to subjects or delivered into cells in vitro or in vivo by art-known methods or as described herein. For example, a base editor system comprising a deaminase (e.g., adenine deaminase) can be delivered by vectors (e.g., viral or non-viral vectors), or by naked DNA, DNA complexes, lipid nanoparticles, or a combination of the aforementioned compositions. A base editor system may be delivered to a cell using any methods available in the art including, but not limited to, physical methods (e.g., electroporation, particle gun, calcium phosphate transfection), viral methods, non-viral methods (e.g., liposomes, cationic methods, lipid nanoparticles, polymeric nanoparticles), or biological non-viral methods (e.g., attenuated bacterial, engineered bacteriophages, mammalian virus-like particles, biological liposomes, erythrocyte ghosts, exosomes).

[0334] Nanoparticles, which can be organic or inorganic, are useful for delivering a base editor system or component thereof. Nanoparticles are well known in the art and any suitable nanoparticle can be used to deliver a base editor system or component thereof, or a nucleic acid molecule encoding such components. In one example, organic (e.g., lipid and/or polymer) nanoparticles are suitable for use as delivery vehicles in certain embodiments of this disclosure. Non-limiting examples of lipid nanoparticles suitable for use in the methods of the present disclosure include those described in International Patent Application Publications No. WO2022140239, WO2022140252, WO2022140238, WO2022159421, WO2022159472, WO2022159475, WO2022159463, WO2021113365, and WO2021141969, the disclosures of each of which is incorporated herein by reference in its entirety for all purposes.

### Viral Vectors

[0335] A base editor described herein can be delivered with a viral vector. In some embodiments, a base editor disclosed herein can be encoded on a nucleic acid that is contained in a viral vector. In some embodiments, one or more components of the base editor system can be encoded on one or more viral vectors.

[0336] Viral vectors can include lentivirus (e.g., HIV and FIV-based vectors), Adenovirus (e.g., AD100), Retrovirus (e.g., Maloney murine leukemia virus, MML-V), herpesvirus vectors (e.g., HSV-2), and Adeno-associated viruses (AAVs), or other plasmid or viral vector types, in particular, using formulations and doses from, for example, U.S. Pat. No. 8,454,972 (formulations, doses for adenovirus), U.S. Pat. No. 8,404,658 (formulations, doses for AAV) and U.S. Pat. No. 5,846,946 (formulations, doses for DNA plasmids) and from clinical trials and publications regarding the clinical trials involving lentivirus, AAV and adenovirus. For example, for AAV, the route of administration, formulation and dose can be as in U.S. Pat. No. 8,454,972 and as in clinical trials involving AAV. For Adenovirus, the route of administration, formulation and dose can be as in U.S. Pat. No. 8,404,658 and as in clinical trials involving adenovirus. For plasmid delivery, the route of administration, formulation and dose can be as in U.S. Pat. No. 5,846,946 and as in clinical studies involving plasmids. Doses can be based on or extrapolated to an average 70 kg individual (e.g., a male adult human), and can be adjusted for patients, subjects, mammals of different weight and species. Frequency of administration is within the ambit of the medical or veterinary practitioner (e.g., physician, veterinarian), depending on usual factors including the age, sex, general health, other conditions of the patient or subject and the particular condition or symptoms being addressed. The viral vectors can be injected into the tissue of interest. For cell-type specific base editing, the expression of the base editor and optional guide nucleic acid can be driven by a cell-type specific promoter.

[0337] Viral vectors can be selected based on the application. For example, for in vivo gene delivery, AAV can be advantageous over other viral vectors. In some embodiments, AAV allows low toxicity, which can be due to the purification method not requiring ultra-centrifugation of cell particles that can activate the immune response. In some embodiments, AAV allows low probability of causing insertional mutagenesis because it doesn't integrate into the host genome. Adenoviruses are commonly used as vaccines because of the strong immunogenic response they induce. Packaging capacity of the viral vectors can limit the size of the base editor that can be packaged into the vector.

[0338] AAV has a packaging capacity of about 4.5 Kb or 4.75 Kb including two 145 base inverted terminal repeats (ITRs). This means disclosed base editor as well as a promoter and transcription terminator can fit into a single viral vector. Constructs larger than 4.5 or 4.75 Kb can lead to significantly reduced virus production. For example, SpCas9 is quite large, the gene itself is over 4.1 Kb, which makes it difficult for packing into AAV. Therefore, embodiments of the present disclosure include utilizing a disclosed base editor which is shorter in length than conventional base editors. In some examples, the base editors are less than 4 kb. Disclosed base editors can be less than 4.5 kb, 4.4 kb, 4.3 kb, 4.2 kb, 4.1 kb, 4 kb, 3.9 kb, 3.8 kb, 3.7 kb, 3.6 kb, 3.5 kb, 3.4 kb, 3.3 kb, 3.2 kb, 3.1 kb, 3 kb, 2.9 kb, 2.8 kb, 2.7 kb, 2.6 kb, 2.5 kb, 2 kb, or 1.5 kb. In some embodiments, the disclosed base editors are 4.5 kb or less in length.

[0339] An AAV can be AAV1, AAV2, AAV5, AAV6 or any combination thereof. One can select the type of AAV with regard to the cells to be targeted; e.g., one can select AAV serotypes 1, 2, 5 or a hybrid capsid AAV1, AAV2, AAV5 or any combination thereof for targeting brain or neuronal cells; and one can select AAV4 for targeting cardiac tissue. AAV8 is useful for delivery to the liver. A tabulation of certain AAV serotypes as to these cells can be found in Grimm, D. et al, J. Virol. 82: 5887-5911 (2008)).

[0340] In some embodiments, lentiviral vectors are used to transduce a cell of interest with a polynucleotide encoding a base editor or base editor system as provided herein. Lentiviruses are complex retroviruses that have the ability to infect and express their genes in both mitotic and post-mitotic cells. The most commonly known lentivirus is the human immunodeficiency virus (HIV), which uses the envelope glycoproteins of other viruses to target a broad range of cell types.

[0341] In another embodiment, minimal non-primate lentiviral vectors based on the equine infectious anemia virus (EIAV) are also contemplated. In another embodiment, RetinoStat®, an equine infectious anemia virus-based lentiviral gene therapy vector that expresses angiostatic proteins endostatin and angiostatin that is contemplated to be delivered via a subretinal injection. In another embodiment, use of self-inactivating lentiviral vectors are contemplated.

[0342] Any RNA of the systems, for example a guide RNA or a base editor-encoding mRNA, can be delivered in the form of RNA. Base editor-encoding mRNA can be generated using in vitro transcription. For example, nuclease mRNA can be synthesized using a PCR cassette containing the following elements: T7 promoter, optional kozak sequence (GCCACC), nuclease sequence, and 3′ UTR such as a 3′ UTR from beta globin-polyA tail. The cassette can be used for transcription by T7 polymerase. Guide polynucleotides (e.g., gRNA) can also be transcribed using in vitro transcription from a cassette containing a T7 promoter, followed by the sequence “GG”, and guide polynucleotide sequence.

### Non-Viral Platforms for Gene Transfer

[0343] Non-viral platforms for introducing a heterologous polynucleotide into a cell of interest are known in the art.

[0344] For example, the disclosure provides a method of inserting a heterologous polynucleotide into the genome of a cell using a Cas9 or Cas12 (e.g., Cas12b) ribonucleoprotein complex (RNP)-DNA template complex where an RNP including a Cas9 or Cas12 nuclease domain and a guide RNA, wherein the guide RNA specifically hybridizes to a target region of the genome of the cell, and wherein the Cas nuclease domain cleaves the target region to create an insertion site in the genome of the cell. A DNA template is then used to introduce a heterologous polynucleotide. In embodiments, the DNA template is a double-stranded or single-stranded DNA template, wherein the size of the DNA template is about 200 nucleotides or is greater than about 200 nucleotides, wherein the 5′ and 3′ ends of the DNA template comprise nucleotide sequences that are homologous to genomic sequences flanking the insertion site. In some embodiments, the DNA template is a single-stranded circular DNA template. In embodiments, the molar ratio of RNP to DNA template in the complex is from about 3:1 to about 100:1.

[0345] In some embodiments, the DNA template is a linear DNA template. In some examples, the DNA template is a single-stranded DNA template. In certain embodiments, the single-stranded DNA template is a pure single-stranded DNA template. In some embodiments, the single stranded DNA template is a single-stranded oligodeoxynucleotide (ssODN).

[0346] In other embodiments, a single-stranded DNA (ssDNA) can produce efficient HDR with minimal off-target integration. In one embodiment, an ssDNA phage is used to efficiently and inexpensively produce long circular ssDNA (cssDNA) donors. These cssDNA donors serve as efficient HDR templates when used with Cas9 or Cas12 (e.g., Cas12a, Cas12b), with integration frequencies superior to linear ssDNA (QssDNA) donors.

### Inteins

[0347] Inteins (intervening protein) are auto-processing domains found in a variety of diverse organisms, which carry out a process known as protein splicing.

[0348] Non-limiting examples of inteins include any intein or intein-pair known in the art, which include a synthetic intein based on the dnaE intein, the Cfa-N (e.g., split intein-N) and Cfa-C (e.g., split intein-C) intein pair, has been described (e.g., in Stevens et al., J Am Chem Soc. 2016 Feb. 24; 138(7):2162-5, incorporated herein by reference), and DnaE. Non-limiting examples of pairs of inteins that may be used in accordance with the present disclosure include: Cfa DnaE intein, Ssp GyrB intein, Ssp DnaX intein, Ter DnaE3 intein, Ter ThyX intein, Rma DnaB intein and Cne Prp8 intein (e.g., as described in U.S. Pat. No. 8,394,604, incorporated herein by reference). Exemplary nucleotide and amino acid sequences of inteins are provided in the Sequence Listing at SEQ ID NOs: 370-377 and 389-424. Inteins suitable for use in embodiments of the present disclosure and methods for use thereof are described in U.S. Pat. No. 10,526,401, International Patent Application Publication No. WO 2013/045632, and in U.S. Patent Application Publication No. US 2020/0055900, the full disclosures of which are incorporated herein by reference in their entireties by reference for all purposes.

[0349] Intein-N and intein-C may be fused to the N-terminal portion of a split Cas9 and the C-terminal portion of the split Cas9, respectively, for the joining of the N-terminal portion of the split Cas9 and the C-terminal portion of the split Cas9. For example, in some embodiments, an intein-N is fused to the C-terminus of the N-terminal portion of the split Cas9, i.e., to form a structure of N—[N-terminal portion of the split Cas9]-[intein-N]—C. In some embodiments, an intein-C is fused to the N-terminus of the C-terminal portion of the split Cas9, i.e., to form a structure of N-[intein-C]—[C-terminal portion of the split Cas9]-C. In embodiments, a base editor is encoded by two polynucleotides, where one polynucleotide encodes a fragment of the base editor fused to an intein-N and another polynucleotide encodes a fragment of the base editor fused to an intein-C. Methods for designing and using inteins are known in the art and described, for example by WO2014004336, WO2017132580, WO2013045632A1, US20150344549, and US20180127780, each of which is incorporated herein by reference in their entirety.

[0350] In some embodiments, an ABE was split into N- and C-terminal fragments at Ala, Ser, Thr, or Cys residues within selected regions of SpCas9. These regions correspond to loop regions identified by Cas9 crystal structure analysis.

[0351] The N-terminus of each fragment is fused to an intein-N and the C-terminus of each fragment is fused to an intein C at amino acid positions 5303, T310, T313, S355, A456, S460, A463, T466, S469, T472, T474, C574, S577, A589, and S590, referenced to SEQ ID NO: 197.

### Pharmaceutical Compositions

[0352] In some aspects, the present disclosure provides a pharmaceutical composition comprising any of the cells, polynucleotides, vectors, base editors, base editor systems, guide polynucleotides, fusion proteins, complexes, or the fusion protein-guide polynucleotide complexes described herein.

[0353] The pharmaceutical compositions of the present disclosure can be prepared in accordance with known techniques. See, e.g., Remington, The Science And Practice of Pharmacy (21st ed. 2005). In general, the cell, or population thereof is admixed with a suitable carrier prior to administration or storage, and in some embodiments, the pharmaceutical composition further comprises a pharmaceutically acceptable carrier. Suitable pharmaceutically acceptable carriers generally comprise inert substances that aid in administering the pharmaceutical composition to a subject, aid in processing the pharmaceutical compositions into deliverable preparations, or aid in storing the pharmaceutical composition prior to administration. Pharmaceutically acceptable carriers can include agents that can stabilize, optimize or otherwise alter the form, consistency, viscosity, pH, pharmacokinetics, solubility of the formulation. Such agents include buffering agents, wetting agents, emulsifying agents, diluents, encapsulating agents, and skin penetration enhancers. For example, carriers can include, but are not limited to, saline, buffered saline, dextrose, arginine, sucrose, water, glycerol, ethanol, sorbitol, dextran, sodium carboxymethyl cellulose, and combinations thereof.

[0354] In some embodiments, the pharmaceutical composition is formulated for delivery to a subject. Suitable routes of administrating the pharmaceutical composition described herein include, without limitation: topical, subcutaneous, transdermal, intradermal, intralesional, intraarticular, intraperitoneal, intravesical, transmucosal, gingival, intradental, intracochlear, transtympanic, intraorgan, epidural, intrathecal, intramuscular, intravenous, intravascular, intraosseus, periocular, intratumoral, intracerebral, and intracerebroventricular administration.

[0355] In some embodiments, the pharmaceutical composition described herein is administered locally to a diseased site. In some embodiments, the pharmaceutical composition described herein is administered to a subject by injection, by means of a catheter, by means of a suppository, or by means of an implant, the implant being of a porous, non-porous, or gelatinous material, including a membrane, such as a sialastic membrane, or a fiber.

[0356] In some embodiments, any of the fusion proteins, gRNAs, and/or complexes described herein are provided as part of a pharmaceutical composition. In some embodiments, the pharmaceutical composition comprises any of the fusion proteins or complexes provided herein. In some embodiments pharmaceutical composition comprises a gRNA, a nucleic acid programmable DNA binding protein, a cationic lipid, and a pharmaceutically acceptable excipient. In embodiments, pharmaceutical compositions comprise a lipid nanoparticle and a pharmaceutically acceptable excipient. In embodiments, the lipid nanoparticle contains a gRNA, a base editor, a complex, a base editor system, or a component thereof of the present disclosure, and/or one or more polynucleotides encoding the same. Pharmaceutical compositions can optionally comprise one or more additional therapeutically active substances.

[0357] The compositions, as described above, can be administered in effective amounts. The effective amount will depend upon the mode of administration, the particular condition being treated, and the desired outcome. It may also depend upon the stage of the condition, the age and physical condition of the subject, the nature of concurrent therapy, if any, and like factors well-known to the medical practitioner. For therapeutic applications, it is that amount sufficient to achieve a medically desirable result.

[0358] In some embodiments, compositions in accordance with the present disclosure can be used for treatment of any of a variety of diseases, disorders, and/or conditions.

### Methods of Treatment

[0359] Some aspects of the present disclosure provide methods of treating a subject in need, the method comprising administering to a subject in need an effective therapeutic amount of a pharmaceutical composition as described herein. More specifically, the methods of treatment include administering to a subject in need thereof one or more pharmaceutical compositions comprising one or more cells having at least one edited gene. In other embodiments, the methods of the disclosure comprise expressing or introducing into a cell a base editor polypeptide and one or more guide RNAs capable of targeting a nucleic acid molecule encoding at least one polypeptide.

[0360] One of ordinary skill in the art would recognize that multiple administrations of the pharmaceutical compositions contemplated in particular embodiments may be required to affect the desired therapy. For example, a composition may be administered to the subject 1, 2, 3, 4, 5, 6, 7, 8, 9, or 10 or more times over a span of 1 week, 2 weeks, 3 weeks, 1 month, 2 months, 3 months, 4 months, 5 months, 6 months, 1 year, 2 years, 5, years, 10 years, or more.

[0361] Administration of the pharmaceutical compositions contemplated herein may be carried out using conventional techniques including, but not limited to, infusion, transfusion, or parenterally. In some embodiments, parenteral administration includes infusing or injecting intravascularly, intravenously, intramuscularly, intraarterially, intrathecally, intratumorally, intradermally, intraperitoneally, transtracheally, subcutaneously, subcuticularly, intraarticularly, subcapsularly, subarachnoidly and intrasternally.

### Kits

[0362] The disclosure provides kits for the treatment of a disease or disorder in a subject. In some embodiments, the kit further includes a base editor system or a polynucleotide encoding a base editor system, wherein the base editor polypeptide system a nucleic acid programmable DNA binding protein (napDNAbp), a deaminase, and a guide RNA. In some embodiments, the napDNAbp is Cas9 or Cas12. In some embodiments, the polynucleotide encoding the base editor is a mRNA sequence. In some embodiments, the deaminase is an adenosine deaminase. In some embodiments, the kit comprises an edited cell and instructions regarding the use of such cell.

[0363] The kits may further comprise written instructions for using a base editor, base editor system and/or edited cell as described herein. In other embodiments, the instructions include at least one of the following: precautions; warnings; clinical studies; and/or references. The instructions may be printed directly on the container (when present), or as a label applied to the container, or as a separate sheet, pamphlet, card, or folder supplied in or with the container. In a further embodiment, a kit comprises instructions in the form of a label or separate insert (package insert) for suitable operational parameters. In yet another embodiment, the kit comprises one or more containers with appropriate positive and negative controls or control samples, to be used as standard(s) for detection, calibration, or normalization. The kit can further comprise a second container comprising a pharmaceutically-acceptable buffer, such as (sterile) phosphate-buffered saline, Ringer's solution, or dextrose solution. It can further include other materials desirable from a commercial and user standpoint, including other buffers, diluents, filters, needles, syringes, and package inserts with instructions for use.

[0364] The practice of embodiments of the present disclosure employs, unless otherwise indicated, conventional techniques of molecular biology (including recombinant techniques), microbiology, cell biology, biochemistry and immunology, which are well within the purview of the skilled artisan. Such techniques are explained fully in the literature, such as, “Molecular Cloning: A Laboratory Manual”, second edition (Sambrook, 1989); “Oligonucleotide Synthesis” (Gait, 1984); “Animal Cell Culture” (Freshney, 1987); “Methods in Enzymology” “Handbook of Experimental Immunology” (Weir, 1996); “Gene Transfer Vectors for Mammalian Cells” (Miller and Calos, 1987); “Current Protocols in Molecular Biology” (Ausubel, 1987); “PCR: The Polymerase Chain Reaction”, (Mullis, 1994); “Current Protocols in Immunology” (Coligan, 1991). These techniques are applicable to the production of the polynucleotides and polypeptides of the disclosure, and, as such, may be considered in making and practicing embodiments of the disclosure. Particularly useful techniques for particular embodiments will be discussed in the sections that follow.

[0365] The following examples are put forth so as to provide those of ordinary skill in the art with a complete disclosure and description of how to make and use the assay, screening, and therapeutic methods of the disclosure, and are not intended to limit the scope of what the inventors regard as their invention.

### EXAMPLES

### Example 1: Adenosine Base Editors with Increased Editing Efficiency

[0366] Base editing systems that include a Tad7.10-dCas9 fusion proteins are capable of editing a target polynucleotide with approximately 10-20% efficiency, but for uses requiring higher efficiency their use may be limited. In an effort to identify adenine base editors having increased efficiency and specificity, constructs comprising the adenosine deaminase TadA 7.10 were mutagenized by error prone PCR and subsequently cloned into an expression vector adjacent to a nucleic acid sequence encoding dCas9, a nucleic acid programmable DNA binding protein (FIG. 1A). The expression vectors comprising the adenosine deaminase variants were co-transformed into competent bacterial cells with a selection plasmid encoding chloramphenicol resistance (CamR) and spectinomycin resistance (SpectR) and having a kanamycin resistance gene that was rendered nonfunctional by two point mutations (evolution round 7 strategy) (FIG. 1B). The cells were selected for restoration of kanamycin resistance, which was a read out for adenosine deaminase activity. In subsequent rounds of selection, the expression vectors were co-transformed into competent cells with a plasmid encoding chloramphenicol resistance (CamR) and spectinomycin resistance (SpectR) and having a kanamycin resistance gene that was rendered nonfunctional by three point mutations (evolution round 8 strategy) (FIG. 1C).

[0367] An inactivated kanamycin resistance gene nucleic acid sequence is provided below:

(SEQ ID NO: 480)
ccggaattgccagctggggcgccctctggtaaggttgggaagccctgca
aagtaaactggatggctttcttgccgccaaggatctgatggcgcagggg
atcaagatctgatcaagagacaggatgaggatcctttcgcATGATCGAA
TAAGATGGATTGCACGCAGGTTCTCCGGCCGCTTAGGTGGAGCGCCTAT
TCGGCTATGACTGGGCACAACAGACAATCGGCTGCTCTGATGCCGCCGT
GTTCCGGCTGTCAGCGCAGGGGCGCCCGGTTCTTTTTGTCAAGACCGAC
CTGTCCGGTGCCCTGAATGAACTGCAGGACGAGGCAGCGCGGCTATCGT
GGCTGGCCACGACGGGCGTTCCTTGCGCAGCTGTGCTCGACGTTGTCAC
TGAAGCGGGAAGGGACTGGCTGCTATTGGGCGAAGTGCCGGGGCAGGAT
CTCCTGTCATCTCACCTTGCTCCTGCCGAGAAAGTATCCATCATGGCTG
ATGCAATGCGGCGGCTGCATACGCTTGATCCGGCTACCTGCCCATTCGA
CCACCAAGCGAAACATCGCATCGAGCGAGCACGTACTCGGATGGAAGCC
GGTCTTGTCGATCAGGATGATCTGGACGAAGAGCATCAGGGGCTCGCGC
CAGCCGAACTGTTCGCCAGGCTCAAGGCGCGCATGCCCGACGGCGAGGA
TCTCGTCGTGACCCATGGCGATGCCTGCTTGCCGAATATCATGGTGGAA
AATGGCCGCTTTTCTGGATTCATTAACTGTGGCCGGCTGGGTGTGGCGG
ACCGCTATCAGGACATAGCGTTGGCTACCCGTGATATTGCTGAAGAGCT
TGGCGGCGAATGGGCTGACCGCTTCCTCGTGCTTTACGGTATCGCCGCT
CCCGATTCGCAGCGCATCGCCTTCTATCGCCTTCTTGACGAGTTCTTCT
AA

[0368] In the above sequence, lower case denotes the kanamycin resistance promoter region, bold sequence indicates targeted inactivation portion (Q4* and W15*), the italicized sequence denotes the targeted inactive site of kanamycin resistance gene (D208N), and the underlined sequences denote the PAM sequences.

[0369] Again, the cells were plated onto a series of agarose plates with increasing kanamycin concentration. As shown in FIG. 2, adenosine deaminase variants having efficient base editing activity were able to correct the mutations present in the kanamycin resistance gene and were selected for further analysis. Adenosine deaminase variants used in base editors showing efficient base editing in bacterial cells are described in Table 5B. Mammalian expression vectors encoding base editors comprising the selected adenosine deaminase variants were generated.

[0370] Hek293T cells expressing a β-globin protein associated with sickle cell disease that contained an E6V (also termed E7V) mutation were used to test the editing efficiency of the adenosine deaminase variants (FIGS. 3A and 3B). These cells termed “Hek293T/HBBE6V” cells were transduced using lentiviral vectors expressing a base editing system that included a fusion protein comprising the ABE8s listed in Table 7. The ABE8s were generated by cloning an adenosine deaminase variant into a scaffold that included a circular permutant Cas9 and a bipartite nuclear localization sequence. Circular permutant Cas9s are known in the art and described, for example, in Oakes et al., Cell 176, 254-267, 2019. These sequences are provided herein below.

[0371] Upregulation of fetal hemoglobin is a therapeutic approach to overcoming sickle cell disease. FIG. 3A shows a therapeutically relevant site for upregulation of fetal hemoglobin. Editing adenosines at residues 5 and 8 can significantly reduce BCL11A binding, thereby increasing expression of fetal hemoglobin. Referring to FIG. 3A, the ABE8s exhibited approximately 2-3 fold more base editing activity than the base editor ABE7.10.

TABLE 7
Novel Adenine Base Editors ABE8

| plasmid ID | description |
|---|---|
| 280 | ABE8.1 |
| 281 | ABE8.2 |
| 282 | ABE8.3 |
| 283 | ABE8.4 |
| 284 | ABE8.5 |
| 285 | ABE8.6 |
| 286 | ABE8.7 |
| 287 | ABE8.8 |
| 288 | ABE8.9 |
| 289 | ABE8.10 |
| 290 | ABE8.11 |
| 291 | ABE8.12 |
| 292 | ABE8.13 |
| 293 | ABE8.14 |
| 294 | ABE8.15 |
| 295 | ABE8.16 |
| 296 | ABE8.17 |
| 297 | ABE8.18 |
| 298 | ABE8.19 |
| 299 | ABE8.20 |
| 300 | ABE8.21 |
| 301 | ABE8.22 |
| 302 | ABE8.23 |
| 303 | ABE8.24 |
| 304 | ABE8.25 |

[0372] Referring to FIG. 4, the ABE8s were introduced into Hek293T/HBBE6V cells along with 18, 19, 20, 21, or 22 nucleotide guide RNAs targeting the polynucleotide encoding HBB E6V. The ABE8 editors showed increased editing efficiency when fused to circular permutant (Cp)-Cas9. In total, 40 different ABE8 constructs (Table 8) and three ABE7.10 constructs were tested for editing activity in Hek293T/HBBE6V cells. The sequence of exemplary constructs follows. To evaluate the specificity of editing, target and unintended or bystander mutations were monitored (FIG. 5). Unintended editing of an adenosine in codon 5 was silent. However, unintended editing of codon 9 resulted in a serine to proline mutation. Referring again to FIG. 5, multiple ABE8s showed increased editing efficiency and specificity compared to the ABE7.10 editors, and none of the editors had significant bystander editing that led to the serine to proline missense mutation.

[0373] Further analysis of selected ABE8s and an ABE7.10 control was carried out in fibroblast cells containing the sickle cell mutation. As shown in FIG. 6, the ABE8 editors had increased base editing activity compared to the ABE7.10. ABE8.18 showed approximately 70% efficiency. The selected ABE8 editors also displayed unprecedented specificity. Importantly, the average INDEL formation for all ABE8 editors was less than 0.1%.

TABLE 8
Base editor constructs.

| plasmid | | |
|---|---|---|
| ID | description | function |
| 335 | NGC PAM CP5 variant (S. | monomer_TadA*7.10 + Y147T |
| | pyogenes Cas9)_ABE8.1 | |
| 336 | NGC PAM CP5 variant (S. | monomer_TadA*7.10 + Y147R |
| | pyogrouns Cas9)_ABE8.2 | |
| 337 | NGC PAM CP5 variant (S. | monomer_TadA*7.10 + Q154S |
| | pyogenes Cas9)_ABE8.3 | |
| 338 | NGC PAM CP5 variant (S. | monomer_TadA*7.10 + Y123H |
| | pyogenes Cas9)_ABE8.4 | |
| 339 | NGC PAM CP5 variant (S. | monomer_TadA*7.10 + V82S |
| | pyogenes Cas9)_ABE8.5 | |
| 340 | NGC PAM CP5 variant (S. | monomer_TadA*7.10 + T166R |
| | pyogenes Cas9)_ABE8.6 | |
| 341 | NGC PAM CP5 variant (S. | monomer_TadA*7.10 + Q154R |
| | pyogenes Cas9)_ABE8.7 | |
| 342 | NGC PAM CP5 variant (S. | monomer_Y147R_Q154R_ |
| | pyogenesCas9)_ABE8.8 | Y123H |
| 343 | NGC PAM CP5 variant (S. | monomer_Y147R_Q154R_I76Y |
| | pyogenes Cas9)_ABE8.9 | |
| 344 | NGC PAM CP5 variant (S. | monomer_Y147R_Q154R_ |
| | pyogenes Cas9)_ABE8.10 | T166R |
| 345 | NGC PAM CP5 variant (S. | monomer_Y147T_Q154R |
| | pyogenes Cas9)_ABE8.11 | |
| 346 | NGC PAM CP5 variant (S. | monomer_Y147T_Q154S |
| | pyogenes Cas9)_ABE8.12 | |
| 347 | NGC PAM CP5 variant (S. | monomer_H123Y123H_ |
| | pyogenes Cas9)_ABE8.13 | Y147R_Q154R_I76Y |
| 348 | NGC PAM CP5 variant (S. | monomer_deletion at TadA7.10* |
| | pyogenes Cas9)_ABE7.10 | residue 149 |
| 349 | NGC PAM CP5 variant (S. | monomer_deletion at TadA7.10* |
| | pyogenes Cas9)_ABE7.10 | residue 150 |
| 350 | NGC PAM CP5 variant (S. | monomer_deletion at TadA7.10* |
| | pyogenes Cas9)_ABE7.10 | residue 151 |
| 351 | NGC PAM CP5 variant (S. | monomer_deletion at TadA7.10* |
| | pyogenes Cas9)_ABE7.10 | residue 152 |
| 352 | NGC PAM CP5 variant (S. | monomer_deletion at TadA7.10* |
| | pyogenes Cas9)_ABE7.10 | residue 153 |
| 353 | NGC PAM CP5 variant (S. | monomer_deletion at TadA7.10* |
| | pyogenes Cas9)_ABE7.10 | residue 154 |
| 354 | NGC PAM CP5 variant (S. | monomer_deletion at TadA7.10* |
| | pyogenes Cas9)_ABE7.10 | residue 155 |
| 355 | NGC PAM CP5 variant (S. | monomer_deletion at TadA7.10* |
| | pyogenes Cas9)_ABE7.10 | residue 156 |
| 356 | NGC PAM CP5 variant (S. | monomer_deletion at TadA7.10* |
| | pyogenes Cas9)_ABE7.10 | residue 157 |
| 357 | NGC PAM CP5 variant (S. | heterodimer_TadA*7.10 + |
| | pyogenes Cas9)_ABE8.14 | Y147T |
| 358 | NGC PAM CP5 variant (S. | heterodimer_TadA*7.10 + |
| | pyogenes Cas9)_ABE8.15 | Y147R |
| 359 | NGC PAM CP5 variant (S. | heterodimer_TadA*7.10 + Q154S |
| | pyogenes Cas9)_ABE8.16 | |
| 360 | NGC PAM CP5 variant (S. | heterodimer_TadA*7.10 + |
| | pyogenes Cas9)_ABE8.17 | Y123H |
| 361 | NGC PAM C | heterodimer_TadA*7.10 + V82S |
| | P5 variant (S. pyogenes | |
| | Cas9)_ABE8.18 | |
| 362 | NGC PAM CP5 variant (S. | heterodimer_TadA*7.10 + T166R |
| | pyogenes Cas9)_ABE8.19 | |
| 363 | NGC PAM CP5 variant (S. | heterodimer_TadA*7.10 + |
| | pyogenes Cas9)_ABE8.20 | Q154R |
| 364 | NGC PAM CP5 variant (S. | heterodimer_ |
| | pyogenes Cas9)_ABE8.21 | Y147R_Q154R_Y123H |
| 365 | NGC PAM CP5 variant (S. | heterodimer_ |
| | pyogenes Cas9)_ABE8.22 | Y147R_Q154R_I76Y |
| 366 | NGC PAM CP5 variant (S. | heterodimer_ |
| | pyogenes Cas9)_ABE8.23 | Y147R_Q154R_T166R |
| 367 | NGC PAM CP5 variant (S. | heterodimer_Y147T_Q154R |
| | pyogenes Cas9)_ABE8.24 | |
| 368 | NGC PAM CP5 variant (S. | heterodimer_Y147T_Q154S |
| | pyogenes Cas9)_ABE8.25 | |
| 369 | NGC PAM CP5 variant (S. | heterodimer_H123Y123H_ |
| | pyogenes Cas9)_ABE8.26 | Y147R_Q154R_I76Y |
| 370 | NGC PAM CP5 variant (S. | heterodimer_deletion at |
| | pyogenes Cas9)_ABE7.10 | TadA7.10* residue 149 |
| 371 | NGC PAM CP5 variant (S. | heterodimer_deletion at |
| | pyogenes Cas9)_ABE7.10 | TadA7.10* residue 150 |
| 372 | NGC PAM CP5 variant (S. | heterodimer_deletion at |
| | pyogenes Cas9)_ABE7.10 | TadA7.10* residue 151 |
| 373 | NGC PAM CP5 variant (S. | heterodimer_deletion at |
| | pyogenes Cas9)_ABE7.10 | TadA7.10* residue 152 |
| 374 | NGC PAM CP5 variant (S. | heterodimer_deletion at |
| | pyogenes Cas9)_ABE7.10 | TadA7.10* residue 153 |
| 375 | NGC PAM CP5 variant (S. | heterodimer_deletion at |
| | pyogenes Cas9)_ABE7.10 | TadA7.10* residue 154 |
| 376 | NGC PAM CP5 variant (S. | heterodimer_deletion at |
| | pyogenes Cas9)_ABE7.10 | TadA7.10* residue 155 |
| 377 | NGC PAM CP5 variant (S. | heterodimer_deletion at |
| | pyogenes Cas9)_ABE7.10 | TadA7.10* residue 156 |
| 378 | NGC PAM CP5 variant (S. | heterodimer_deletion at |
| | pyogenes Cas9)_ABE7.10 | TadA7.10* residue 157 |

### Example 2: Development of New Adenosine Deaminase Variants

[0374] Experiments were undertaken to identify adenosine deaminase variants with improved characteristics and suitable for use in the methods provided herein. The base editors listed in Table 9 were designed and the editing efficiencies thereof were evaluated in vivo.

[0375] First, experiments were undertaking to evaluate the efficiency of base editing of hematopoietic stem cells containing a Sickle Cell Disease mutation (E6V) in the beta hemoglobin gene (HbSS CD34s). The following base editor systems (see FIG. 7) were used: An Inlaid Base Editor (IBE) in combination with sgRNA_017; ABE8.20-NRCH in combination with sgRNA_027; and ABE8.20+ in combination with sgRNA_027. The term “NRCH” refers to the PAM recognized by the Cas9 variant within the indicated base editor, where N represents A, C, G, or T, R represents A or G, and H represents A, C, or T. The amino acid and/or nucleotide sequences for ABE8.20-NRCH, ABE8.20+, and the Inlaid Base Editor (IBE) referenced in FIG. 7 are provided in Table 10 below. The ABE8.20-NRCH base editor contained a TadA*8.20 deaminase domain, the ABE9v1-NRCH base editor contained a TadA*8.20 deaminase domain with the amino acid alteration S82T, and the ABE9v2 base editor contained a TadA*8.20 deaminase domain with the amino acid alterations S82T, Y147D, T166I, and D167N. As shown in FIG. 7, it was found that Makassar editing (i.e., installing the Makassar edit or the Ser9Pro bystander and other non-synonymous bystanders within the target window on the beta globin gene) was achieved at the beta globin locus in the CD34+ cells grown in XVIVO medium (serum-free stem cell medium) 5 days (i.e., “d5”) post electroporation (EP) and 7 days (i.e., “d7”) in in vitro differentiated erythroid cultures (IVD).

[0376] Experiments were undertaken to evaluate editing efficiencies in CD34+ hematopoietic stem cells (HSCs) using the base editors ABE8.20, ABE9v1, and ABE9v2 (see Table 10) in combination with the guide gRNA931, which contained the spacer sequence AUAAUAGCUGGCAUCACGGU (SEQ ID NO: 481) and the scaffold sequence GUUUUAGAGCUAGAAAUAGCAAGUUAAAAUAAGGCUAGUCCGUUAUCAACUUGAAAAAGUGG CACCGAGUCGGUGCUUUU (SEQ ID NO: 317), and which targeted the base editors to effect a nucleobase alteration(s) to a polynucleotide encoding a CD117 polynucleotide. The cells were transfected with the guide and mRNA encoding the base editors using electroporation. The cells were grown in XVIVO serum free stem cell medium. All of the combinations evaluated resulted in editing efficiencies of greater than 50% (see FIG. 8). The alteration to the CD117 polynucleotide resulted in an amino acid alteration to the encoded CD117 polypeptide that resulted in reduced binding to the antibody ABTx052 so that cells expressing the altered CD117 polypeptide showed reduced binding to the antibody (FIG. 9).

### Example 3: Engraftment of Base Edited Human CD34+ Cells in NBSGW Mice

[0377] Experiments were undertaken to evaluate the engraftment in immunocompromised 6-8 weeks-old female NBSGW mice (NOD.Cg-Kit^{W-41J}Tyr⁺ Prkdc^{scid} Il2rg^{tm1Wjl}/ThomJ) of human CD34 expressing cells (hCD34+ cells) edited according to the methods of the disclosure.

[0378] First, a hemoglobin beta (HBB) gene in the hCD34+ cells was edited by electroporating the cells with a base editor system containing the guide polynucleotide gRNA2861 containing the spacer UUCUCCACAGGAGUCAGGUG (SEQ ID NO: 445) and the mRNA molecule mRNA2518 encoding the base editor ABE9v2 (see amino acid and nucleotide sequences provided in Table 9 and the mRNA2518 nucleotide sequence provided below). The base edited cells contained a “Makassar edit” resulting in expression of a beta globin polypeptide having an alanine at position 6 (Hb G-Makassar). A dose of 1e6 of the edited hCD34+ cells was then transplanted into 15 NBSGW mice at day zero (Group 1 of mice). As a control, 15 NBSGW mice were also transplanted with unedited hCD34+ cells at day zero (Group 2 of mice). At 8 weeks post-transplantation (8 wk Take Down (TD)) of the hCD34+ cells, five mice from each group were euthanized and engraftment of the hCD34+ cells were measured. At 16 weeks post-transplantation (16 wk Take Down (TD)) of the hCD34+ cells, ten mice from each group were euthanized and engraftment of the hCD34+ cells was measured. Bone marrow harvested from the pelvic bones, tibia, and femurs was evaluated. Engraftment of the hCD34+ cells was measured using the following parameters: percent human CD45+(% hCD45); frequencies of cell populations measured using flow cytometry; base edits observed in bulk bone marrow; and base editing observed in sorted (hCD15+, hCD19+, hCD235a+, and lin-CD34+) cell populations.

[0379] At 16 weeks post-transplantation, it was observed that both bulk bone marrow and bone marrow cell sub-populations in the mice transplanted with the edited hCD34+ cells contained hCD34+ cells containing base edited beta globin polynucleotides containing one of the following base modifications (FIG. 10): 9G, 9G+11G, 9G+11G+14G, 5T+9G+11G, where the numbers indicate the nucleotide location of each alteration, and where each alteration is indicated relative to the following sequence, where subscripts indicate the nucleotide locations: ACTTC₅TCCA₉CA₁₁GGA₁₄GTCAGATGC (SEQ ID NO: 439). The target base edit was 9G. The hCD15+, hCD19+, Lin-hCD34+, and GlyA cells were sorted from the bone marrow samples using fluorescence-activated cell sorting (FACS). Base modifications were detected using next-generation sequencing. This data demonstrated that the nucleobase alterations (“Makassar edits”) in the base edited hCD34+ cells were retained in both bulk bone marrow and sorted cell subpopulations at 16 weeks post-transplant.

[0380] Frequencies of cell populations including GlyA, hCD34, Lin(−) hCD34, hCD19, hCD15, hCD33, and hCD45 and chimerism was comparable between edited and edited hCD34+ cells transplanted into the mice (FIGS. 11A-11G), which demonstrated that base editing did not alter engraftment or multilineage reconstitution potential of the hCD34+ cells.

[0381] The following materials and methods were employed in the above examples.

### Sequences

[0382] Table 9 provides a list of amino acid and nucleotide sequences corresponding to base editors used in the Examples.

TABLE 9
Base editor sequences. In the amino acid sequences, adenosine deaminase
domains are in plain text, linkers are in italics, nucleic acid programmable DNA
binding protein (e.g., Cas9-NRCH or Cas9- MQKFRAER*) domains are in bold, and
bipartite nuclear localization signals are underlined. The Cas9-NRCH domains
recognized the PAM sequence CACC. In embodiments, the ABE8.20-NRCH and
ABE8.20+-NRCH base editors avoid introducing a Ser9Pro bystander edit to a beta
globin gene sequence.

| Editor | Amino Acid or Nucleotide Sequence |
|---|---|
| ABE8.20 | MSEVEFSHEYWMRHALTLAKRARDEREVPVGAVLVLNNRVIGEGWNRAIGLHDPTAHAEIM |
| (F149Y)- | ALRQGGLVMQNYRLYDATLYSTFEPCVMCAGAMIHSRIGRVVFGVRNAKTGAAGSLMDVLH |
| NRCH | HPGMNHRVEITEGILADECAALLCRFYRMPRRVFNAQKKAQSSTDSGGSSGGSSGSETPGT |
| | SESATPESSGGSSGGSDKKYSIGLAIGTNSVGWAVITDEYKVPSKKFKVLGNTDRHSIKKN |
| | LIGALLFDSGETAEATRLKRTARRRYTRRKNRICYLQEIFSNEMAKVDDSFFHRLEESFLV |
| | EEDKKHERHPIFGNIVDEVAYHEKYPTIYHLRKKLVDSTDKADLRLIYLALAHMIKFRGHF |
| | LIEGDLNPDNSDVDKLFIQLVQTYNQLFEENPINASGVDAKAILSARLSKSRRLENLIAQL |
| | PGEKKNGLFGNLIALSLGLTPNFKSNFDLAEDAKLQLSKDTYDDDLDNLLAQIGDQYADLF |
| | LAAKNLSDAILLSDILRVNTEITKAPLSASMVKRYDEHHQDLTLLKALVRQQLPEKYKEIF |
| | FDQSKNGYAGYIDGGASQEEFYKFIKPILEKMDGTEELLVKLNREDLLRKQRTFDNGIIPH |
| | QIHLGELHAILRRQGDFYPFLKDNREKIEKILTFRIPYYVGPLARGNSRFAWMTRKSEETI |
| | TPWNFEEVVDKGASAQSFIERMTNFDKNLPNEKVLPKHSLLYEYFTVYNELTKVKYVTEGM |
| | RKPAFLSGEQKKAIVDLLFKTNRKVTVKQLKEDYFKKIECFDSVEISGVEDRFNASLGTYH |
| | DLLKIIKDKDFLDNEENEDILEDIVLTLTLFEDREMIEERLKTYAHLFDDKVMKQLKRLRY |
| | TGWGRLSRKLINGIRDKQSGKTILDFLKSDGFANRNFMQLIHDDSLTFKEDIQKAQVSGQG |
| | DSLHEHIANLAGSPAIKKGILQTVKVVDELVKVMGGHKPENIVIEMARENQTTQKGQKNSR |
| | ERMKRIEEGIKELGSQILKEHPVENTQLQNEKLYLYYLQNGRDMYVDQELDINRLSDYDVD |
| | HIVPQSFLKDDSIDNKVLTRSDKNRGKSDNVPSEEVVKKMKNYWRQLLNAKLITQRKFDNL |
| | TKAERGGLSELDKAGFIKRQLVETRQITKHVAQILDSRMNTKYDENDKLIREVKVITLKSK |
| | LVSDFRKDFQFYKVREINNYHHAHDAYLNAVVGTALIKKYPKLESEFVYGDYKVYDVRKMI |
| | AKSEQEIGKATAKYFFYSNIMNFFKTEITLANGEIRKRPLIETNGETGEIVWDKGRDFATV |
| | RKVLSMPQVNIVKKTEVQTGGFSKESILPKGNSDKLIARKKDWDPKKYGGFNSPTVAYSVL |
| | VVAKVEKGKSKKLKSVKELLGITIMERSSFEKNPIDFLEAKGYKEVKKDLIIKLPKYSLFE |
| | LENGRKRMLASAGVLQKGNELALPSKYVNFLYLASHYEKLKGSPEDNEQKQLFVEQHKHYL |
| | DEIIEQISEFSKRVILADANLDKVLSAYNKHRDKPIREQAENIIHLFTLTNLGAPAAFKYF |
| | DTTINRKQYNTTKEVLDATLIRQSITGLYETRIDLSQLGGDEGADKRTADGSEFESPKKKR |
| | KV (SEQ ID NO: 482) |
| ABE8.20- | TAATACGACTCACTATAAGGAAATAAGAGAGAAAAGAAGAGTAAGAAGAAATATAAGAGCC |
| NRCH | ACCATGTCCGAAGTCGAGTTTTCCCATGAGTACTGGATGAGACACGCATTGACTCTCGCAA |
| | AGAGGGCTCGAGATGAACGCGAGGTGCCCGTGGGGGCAGTACTCGTGCTCAACAATCGCGT |
| | AATCGGCGAAGGTTGGAATAGGGCAATCGGACTCCACGACCCCACTGCACATGCGGAAATC |
| | ATGGCCCTTCGACAGGGAGGGCTTGTGATGCAGAATTATCGACTTTATGATGCGACGCTGT |
| | ACTCGACGTTTGAACCTTGCGTAATGTGCGCGGGAGCTATGATTCACTCCCGCATTGGACG |
| | AGTTGTATTCGGTGTTCGCAACGCCAAGACGGGTGCCGCAGGTTCACTGATGGACGTGCTG |
| | CATCATCCAGGCATGAACCACCGGGTAGAAATCACAGAAGGCATATTGGCGGACGAATGTG |
| | CGGCGCTGTTGTGTCGTTTTTATCGCATGCCCAGGCGTGTCTTTAACGCCCAGAAAAAAGC |
| | ACAATCCTCTACTGACTCCGGCGGAAGCAGCGGAGGATCTTCTGGAAGCGAAACCCCAGGC |
| | ACCAGCGAGTCTGCCACACCAGAATCATCTGGCGGTAGCTCCGGCGGCAGCGACAAGAAGT |
| | ATTCTATCGGACTGGCCATCGGCACCAACTCTGTTGGATGGGCCGTGATCACCGACGAGTA |
| | CAAGGTGCCCAGCAAGAAATTCAAGGTGCTGGGCAACACCGACAGGCACAGCATCAAGAAG |
| | AACCTGATCGGCGCACTGCTGTTCGACTCTGGCGAAACAGCCGAGGCCACCAGACTGAAGA |
| | GAACAGCCCGCAGACGGTACACCAGAAGAAAGAACCGGATCTGCTACCTCCAAGAGATCTT |
| | CAGCAACGAGATGGCCAAGGTGGACGACAGCTTCTTCCACAGACTGGAAGAGTCCTTCCTG |
| | GTGGAAGAGGACAAGAAGCACGAGAGACACCCCATCTTCGGCAACATCGTGGACGAGGTGG |
| | CCTACCACGAGAAGTACCCCACCATCTACCACCTGAGAAAGAAACTGGTGGACAGCACCGA |
| | CAAGGCCGACCTGAGACTGATCTATCTGGCCCTGGCTCACATGATCAAGTTCCGGGGCCAC |
| | TTCCTGATCGAGGGCGACCTGAATCCTGACAACAGCGACGTGGACAAGCTGTTCATCCAGC |
| | TGGTGCAGACCTACAACCAGCTGTTCGAGGAAAACCCCATCAACGCCAGCGGAGTGGATGC |
| | CAAGGCCATCCTGTCTGCCAGACTGAGCAAGAGCAGACGGCTGGAAAATCTGATCGCCCAG |
| | CTGCCTGGCGAGAAGAAGAATGGCCTGTTCGGCAACCTGATTGCCCTGAGCCTGGGCCTGA |
| | CACCTAACTTCAAGAGCAACTTCGACCTGGCCGAGGACGCCAAACTGCAGCTGAGCAAGGA |
| | CACCTACGACGACGACCTGGACAATCTGCTGGCCCAGATCGGCGATCAGTACGCCGACTTG |
| | TTTCTGGCCGCCAAGAATCTGAGCGACGCCATCCTGCTGTCCGACATCCTGAGAGTGAACA |
| | CCGAGATCACCAAGGCACCTCTGAGCGCCTCTATGGTCAAGAGATACGACGAGCACCACCA |
| | GGATCTGACCCTGCTGAAGGCCCTCGTTAGACAGCAGCTGCCAGAGAAGTACAAAGAGATT |
| | TTCTTCGACCAGAGCAAGAACGGCTACGCCGGCTACATTGATGGCGGAGCCAGCCAAGAGG |
| | AATTCTACAAGTTCATCAAGCCCATCCTCGAGAAGATGGACGGCACCGAGGAACTGCTGGT |
| | CAAGCTGAACAGAGAGGACCTGCTGAGAAAGCAGAGAACCTTCGACAACGGCATCATCCCT |
| | CACCAGATCCACCTGGGAGAACTGCACGCCATTCTGCGGAGACAAGGGGACTTTTACCCAT |
| | TCCTGAAGGACAACCGGGAAAAGATCGAGAAAATCCTGACCTTCAGGATCCCCTACTACGT |
| | GGGACCACTGGCCAGAGGCAATAGCAGATTCGCCTGGATGACCAGAAAGAGCGAGGAAACC |
| | ATCACTCCCTGGAACTTCGAGGAAGTGGTGGACAAGGGCGCCAGCGCTCAGTCCTTCATCG |
| | AGCGGATGACCAACTTCGATAAGAACCTGCCTAACGAGAAGGTGCTGCCCAAGCACAGCCT |
| | GCTGTACGAGTACTTCACCGTGTACAACGAGCTGACCAAAGTGAAATACGTGACCGAGGGA |
| | ATGAGAAAGCCCGCCTTTCTGAGCGGCGAGCAGAAAAAGGCCATCGTGGATCTGCTGTTCA |
| | AGACCAACCGGAAAGTGACCGTGAAGCAGCTGAAAGAGGACTACTTCAAGAAAATCGAGTG |
| | CTTCGACAGCGTCGAGATCTCCGGCGTGGAAGATCGGTTCAATGCCAGCCTGGGCACATAC |
| | CACGATCTGCTGAAAATTATCAAGGACAAGGACTTCCTGGACAACGAAGAGAACGAGGACA |
| | TCCTTGAGGACATCGTGCTGACACTGACCCTGTTTGAGGACAGAGAGATGATCGAGGAACG |
| | GCTGAAAACATACGCCCACCTGTTCGACGACAAAGTGATGAAGCAACTGAAGCGGCTGAGA |
| | TACACCGGCTGGGGCAGACTGTCTCGGAAGCTGATCAACGGCATCCGGGATAAGCAGTCCG |
| | GCAAGACCATCCTGGACTTTCTGAAGTCCGACGGCTTCGCCAACAGAAACTTCATGCAGCT |
| | GATTCACGACGACAGCCTCACCTTCAAAGAGGATATCCAGAAAGCCCAGGTGTCCGGCCAG |
| | GGCGATTCTCTGCATGAGCACATTGCCAACCTGGCCGGCTCTCCCGCCATTAAGAAAGGCA |
| | TCCTGCAGACAGTGAAGGTGGTGGACGAGCTTGTGAAAGTGATGGGCGGACACAAGCCCGA |
| | GAACATCGTGATCGAAATGGCCAGAGAGAACCAGACCACACAGAAGGGACAGAAGAACAGC |
| | CGCGAGAGAATGAAGCGGATCGAAGAGGGCATCAAAGAGCTGGGCAGCCAGATCCTGAAAG |
| | AACACCCCGTGGAAAACACCCAGCTGCAGAACGAGAAGCTGTACCTGTACTACCTGCAGAA |
| | TGGACGGGATATGTACGTGGACCAAGAGCTGGACATCAACAGACTGTCCGACTACGATGTG |
| | GACCATATCGTGCCCCAGTCTTTTCTGAAGGACGACTCCATCGACAACAAGGTCCTGACCA |
| | GATCCGACAAGAATCGGGGCAAGAGCGACAACGTGCCCTCCGAAGAGGTGGTCAAGAAGAT |
| | GAAGAACTACTGGCGACAGCTGCTGAACGCCAAGCTGATTACCCAGCGGAAGTTCGACAAT |
| | CTGACCAAGGCCGAAAGAGGCGGCCTGAGCGAACTGGATAAGGCCGGCTTCATCAAGAGAC |
| | AGCTGGTGGAAACCCGGCAGATCACAAAGCACGTGGCACAGATTCTGGACTCTCGGATGAA |
| | CACTAAGTACGACGAGAACGACAAACTGATCCGCGAAGTGAAAGTCATCACCCTGAAGTCC |
| | AAGCTGGTGTCCGATTTCCGGAAGGATTTCCAGTTCTACAAAGTGCGCGAGATCAACAACT |
| | ACCATCACGCCCACGACGCCTACCTGAATGCCGTTGTTGGAACAGCCCTGATCAAAAAGTA |
| | CCCTAAGCTGGAAAGCGAGTTCGTGTACGGCGACTACAAGGTGTACGACGTGCGGAAGATG |
| | ATCGCCAAGAGCGAGCAAGAGATTGGCAAGGCAACCGCCAAGTACTTCTTCTACAGCAACA |
| | TCATGAACTTTTTCAAGACAGAGATCACCCTCGCCAACGGCGAGATCAGAAAGCGGCCTCT |
| | GATCGAGACAAACGGCGAAACCGGCGAGATTGTGTGGGATAAGGGCAGAGACTTTGCCACA |
| | GTGCGGAAAGTGCTGAGCATGCCCCAAGTGAATATCGTGAAGAAAACCGAGGTGCAGACAG |
| | GCGGCTTCAGCAAAGAGTCTATCCTGCCTAAGGGGAACTCCGACAAGCTGATCGCCAGAAA |
| | GAAGGACTGGGACCCCAAGAAATACGGCGGCTTTAACTCTCCCACCGTGGCCTATTCTGTT |
| | CTGGTGGTGGCCAAAGTGGAAAAGGGCAAGTCCAAGAAACTCAAGAGCGTGAAAGAGCTGC |
| | TGGGGATCACCATCATGGAAAGAAGCAGCTTCGAGAAGAATCCGATCGATTTCCTCGAGGC |
| | CAAGGGTTACAAAGAAGTGAAAAAGGACCTGATCATCAAGCTCCCCAAGTACTCCCTGTTC |
| | GAGCTGGAAAACGGCCGGAAGAGAATGCTGGCCTCTGCCGGTGTCCTGCAGAAGGGAAACG |
| | AACTGGCCCTGCCTAGCAAATATGTGAACTTCCTGTACCTGGCCAGCCACTATGAGAAGCT |
| | GAAGGGCAGCCCCGAGGACAATGAGCAAAAGCAGCTGTTTGTGGAACAGCACAAGCACTAC |
| | CTGGACGAGATCATCGAGCAGATCAGCGAGTTTAGCAAGAGAGTGATTCTGGCCGACGCCA |
| | ATCTGGACAAAGTGCTGTCCGCCTACAACAAGCACCGGGACAAGCCTATCAGAGAGCAGGC |
| | CGAGAATATCATCCACCTGTTTACCCTGACCAACCTGGGAGCCCCTGCGGCCTTCAAGTAC |
| | TTTGACACCACCATCAACAGGAAGCAGTACAACACCACCAAAGAGGTGCTGGACGCCACTC |
| | TGATCCGCCAGTCTATCACCGGCCTGTACGAGACACGGATCGACCTGTCTCAACTCGGAGG |
| | CGACGAAGGCGCCGATAAGAGAACCGCCGATGGCTCTGAGTTCGAGAGCCCTAAGAAAAAG |
| | CGCAAAGTGTAG (SEQ ID NO: 483) |
| ABE8.20+ | MSEVEFSHEYWMRHALTLAKRARDEREVPVGAVLVLNNRVIGEGWNRAIGLHDPTAHAEIM |
| (ABE8.20 | ALRQGGLVMQNYRLYDATLYSTFEPCVMCAGAMIHSRIGRVVFGVRNAKTGAAGSLMDVLH |
| w/ the | HPGMNHRVEITEGILADECAALLCDFYRMPRRVFNAQKKAQSSINSGGSSGGSSGSETPGT |
| alterations | SESATPESSGGSSGGSDKKYSIGLAIGTNSVGWAVITDEYKVPSKKFKVLGNTDRHSIKKN |
| R147D, | LIGALLFDSGETAEATRLKRTARRRYTRRKNRICYLQEIFSNEMAKVDDSFFHRLEESFLV |
| F149Y, | EEDKKHERHPIFGNIVDEVAYHEKYPTIYHLRKKLVDSTDKADLRLIYLALAHMIKFRGHF |
| T166I, and | LIEGDLNPDNSDVDKLFIQLVQTYNQLFEENPINASGVDAKAILSARLSKSRRLENLIAQL |
| D167N in | PGEKKNGLFGNLIALSLGLTPNFKSNFDLAEDAKLQLSKDTYDDDLDNLLAQIGDQYADLE |
| the TadA* | LAAKNLSDAILLSDILRVNTEITKAPLSASMVKRYDEHHQDLTLLKALVRQQLPEKYKEIF |
| domain) | FDQSKNGYAGYIDGGASQEEFYKFIKPILEKMDGTEELLVKLNREDLLRKQRTFDNGIIPH |
| | QIHLGELHAILRRQGDFYPFLKDNREKIEKILTFRIPYYVGPLARGNSRFAWMTRKSEETI |
| | TPWNFEEVVDKGASAQSFIERMTNFDKNLPNEKVLPKHSLLYEYFTVYNELTKVKYVTEGM |
| | RKPAFLSGEQKKAIVDLLFKTNRKVTVKQLKEDYFKKIECFDSVEISGVEDRFNASLGTYH |
| | DLLKIIKDKDFLDNEENEDILEDIVLTLTLFEDREMIEERLKTYAHLFDDKVMKQLKRLRY |
| | TGWGRLSRKLINGIRDKQSGKTILDFLKSDGFANRNFMQLIHDDSLTFKEDIQKAQVSGQG |
| | DSLHEHIANLAGSPAIKKGILQTVKVVDELVKVMGGHKPENIVIEMARENQTTQKGQKNSR |
| | ERMKRIEEGIKELGSQILKEHPVENTQLQNEKLYLYYLQNGRDMYVDQELDINRLSDYDVD |
| | HIVPQSFLKDDSIDNKVLTRSDKNRGKSDNVPSEEVVKKMKNYWRQLLNAKLITQRKFDNL |
| | TKAERGGLSELDKAGFIKRQLVETRQITKHVAQILDSRMNTKYDENDKLIREVKVITLKSK |
| | LVSDFRKDFQFYKVREINNYHHAHDAYLNAVVGTALIKKYPKLESEFVYGDYKVYDVRKMI |
| | AKSEQEIGKATAKYFFYSNIMNFFKTEITLANGEIRKRPLIETNGETGEIVWDKGRDFATV |
| | RKVLSMPQVNIVKKTEVQTGGFSKESILPKGNSDKLIARKKDWDPKKYGGFNSPTVAYSVL |
| | VVAKVEKGKSKKLKSVKELLGITIMERSSFEKNPIDFLEAKGYKEVKKDLIIKLPKYSLFE |
| | LENGRKRMLASAGVLQKGNELALPSKYVNFLYLASHYEKLKGSPEDNEQKQLFVEQHKHYL |
| | DEIIEQISEFSKRVILADANLDKVLSAYNKHRDKPIREQAENIIHLFTLTNLGAPAAFKYF |
| | DTTINRKQYNTTKEVLDATLIRQSITGLYETRIDLSQLGGDEGADKRTADGSEFESPKKKR |
| | KV (SEQ ID NO: 484) |
| ABE8.20+ | TAATACGACTCACTATAAGGAAATAAGAGAGAAAAGAAGAGTAAGAAGAAATATAAGAGCC |
| | ACCATGTCCGAAGTCGAGTTTTCCCATGAGTACTGGATGAGACACGCATTGACTCTCGCAA |
| | AGAGGGCTCGAGATGAACGCGAGGTGCCCGTGGGGGCAGTACTCGTGCTCAACAATCGCGT |
| | AATCGGCGAAGGTTGGAATAGGGCAATCGGACTCCACGACCCCACTGCACATGCGGAAATC |
| | ATGGCCCTTCGACAGGGAGGGCTTGTGATGCAGAATTATCGACTTTATGATGCGACGCTGT |
| | ACTCGACGTTTGAACCTTGCGTAATGTGCGCGGGAGCTATGATTCACTCCCGCATTGGACG |
| | AGTTGTATTCGGTGTTCGCAACGCCAAGACGGGTGCCGCAGGTTCACTGATGGACGTGCTG |
| | CATCATCCAGGCATGAACCACCGGGTAGAAATCACAGAAGGCATATTGGCGGACGAATGTG |
| | CGGCGCTGTTGTGTGACTTTTATCGCATGCCCAGGCGTGTCTTTAACGCCCAGAAAAAAGC |
| | ACAATCCTCTATAAACTCCGGCGGAAGCAGCGGAGGATCTTCTGGAAGCGAAACCCCAGGC |
| | ACCAGCGAGTCTGCCACACCAGAATCATCTGGCGGTAGCTCCGGCGGCAGCGACAAGAAGT |
| | ATTCTATCGGACTGGCCATCGGCACCAACTCTGTTGGATGGGCCGTGATCACCGACGAGTA |
| | CAAGGTGCCCAGCAAGAAATTCAAGGTGCTGGGCAACACCGACAGGCACAGCATCAAGAAG |
| | AACCTGATCGGCGCACTGCTGTTCGACTCTGGCGAAACAGCCGAGGCCACCAGACTGAAGA |
| | GAACAGCCCGCAGACGGTACACCAGAAGAAAGAACCGGATCTGCTACCTCCAAGAGATCTT |
| | CAGCAACGAGATGGCCAAGGTGGACGACAGCTTCTTCCACAGACTGGAAGAGTCCTTCCTG |
| | GTGGAAGAGGACAAGAAGCACGAGAGACACCCCATCTTCGGCAACATCGTGGACGAGGTGG |
| | CCTACCACGAGAAGTACCCCACCATCTACCACCTGAGAAAGAAACTGGTGGACAGCACCGA |
| | CAAGGCCGACCTGAGACTGATCTATCTGGCCCTGGCTCACATGATCAAGTTCCGGGGCCAC |
| | TTCCTGATCGAGGGCGACCTGAATCCTGACAACAGCGACGTGGACAAGCTGTTCATCCAGC |
| | TGGTGCAGACCTACAACCAGCTGTTCGAGGAAAACCCCATCAACGCCAGCGGAGTGGATGC |
| | CAAGGCCATCCTGTCTGCCAGACTGAGCAAGAGCAGACGGCTGGAAAATCTGATCGCCCAG |
| | CTGCCTGGCGAGAAGAAGAATGGCCTGTTCGGCAACCTGATTGCCCTGAGCCTGGGCCTGA |
| | CACCTAACTTCAAGAGCAACTTCGACCTGGCCGAGGACGCCAAACTGCAGCTGAGCAAGGA |
| | CACCTACGACGACGACCTGGACAATCTGCTGGCCCAGATCGGCGATCAGTACGCCGACTTG |
| | TTTCTGGCCGCCAAGAATCTGAGCGACGCCATCCTGCTGTCCGACATCCTGAGAGTGAACA |
| | CCGAGATCACCAAGGCACCTCTGAGCGCCTCTATGGTCAAGAGATACGACGAGCACCACCA |
| | GGATCTGACCCTGCTGAAGGCCCTCGTTAGACAGCAGCTGCCAGAGAAGTACAAAGAGATT |
| | TTCTTCGACCAGAGCAAGAACGGCTACGCCGGCTACATTGATGGCGGAGCCAGCCAAGAGG |
| | AATTCTACAAGTTCATCAAGCCCATCCTCGAGAAGATGGACGGCACCGAGGAACTGCTGGT |
| | CAAGCTGAACAGAGAGGACCTGCTGAGAAAGCAGAGAACCTTCGACAACGGCATCATCCCT |
| | CACCAGATCCACCTGGGAGAACTGCACGCCATTCTGCGGAGACAAGGGGACTTTTACCCAT |
| | TCCTGAAGGACAACCGGGAAAAGATCGAGAAAATCCTGACCTTCAGGATCCCCTACTACGT |
| | GGGACCACTGGCCAGAGGCAATAGCAGATTCGCCTGGATGACCAGAAAGAGCGAGGAAACC |
| | ATCACTCCCTGGAACTTCGAGGAAGTGGTGGACAAGGGCGCCAGCGCTCAGTCCTTCATCG |
| | AGCGGATGACCAACTTCGATAAGAACCTGCCTAACGAGAAGGTGCTGCCCAAGCACAGCCT |
| | GCTGTACGAGTACTTCACCGTGTACAACGAGCTGACCAAAGTGAAATACGTGACCGAGGGA |
| | ATGAGAAAGCCCGCCTTTCTGAGCGGCGAGCAGAAAAAGGCCATCGTGGATCTGCTGTTCA |
| | AGACCAACCGGAAAGTGACCGTGAAGCAGCTGAAAGAGGACTACTTCAAGAAAATCGAGTG |
| | CTTCGACAGCGTCGAGATCTCCGGCGTGGAAGATCGGTTCAATGCCAGCCTGGGCACATAC |
| | CACGATCTGCTGAAAATTATCAAGGACAAGGACTTCCTGGACAACGAAGAGAACGAGGACA |
| | TCCTTGAGGACATCGTGCTGACACTGACCCTGTTTGAGGACAGAGAGATGATCGAGGAACG |
| | GCTGAAAACATACGCCCACCTGTTCGACGACAAAGTGATGAAGCAACTGAAGCGGCTGAGA |
| | TACACCGGCTGGGGCAGACTGTCTCGGAAGCTGATCAACGGCATCCGGGATAAGCAGTCCG |
| | GCAAGACCATCCTGGACTTTCTGAAGTCCGACGGCTTCGCCAACAGAAACTTCATGCAGCT |
| | GATTCACGACGACAGCCTCACCTTCAAAGAGGATATCCAGAAAGCCCAGGTGTCCGGCCAG |
| | GGCGATTCTCTGCATGAGCACATTGCCAACCTGGCCGGCTCTCCCGCCATTAAGAAAGGCA |
| | TCCTGCAGACAGTGAAGGTGGTGGACGAGCTTGTGAAAGTGATGGGCGGACACAAGCCCGA |
| | GAACATCGTGATCGAAATGGCCAGAGAGAACCAGACCACACAGAAGGGACAGAAGAACAGC |
| | CGCGAGAGAATGAAGCGGATCGAAGAGGGCATCAAAGAGCTGGGCAGCCAGATCCTGAAAG |
| | AACACCCCGTGGAAAACACCCAGCTGCAGAACGAGAAGCTGTACCTGTACTACCTGCAGAA |
| | TGGACGGGATATGTACGTGGACCAAGAGCTGGACATCAACAGACTGTCCGACTACGATGTG |
| | GACCATATCGTGCCCCAGTCTTTTCTGAAGGACGACTCCATCGACAACAAGGTCCTGACCA |
| | GATCCGACAAGAATCGGGGCAAGAGCGACAACGTGCCCTCCGAAGAGGTGGTCAAGAAGAT |
| | GAAGAACTACTGGCGACAGCTGCTGAACGCCAAGCTGATTACCCAGCGGAAGTTCGACAAT |
| | CTGACCAAGGCCGAAAGAGGCGGCCTGAGCGAACTGGATAAGGCCGGCTTCATCAAGAGAC |
| | AGCTGGTGGAAACCCGGCAGATCACAAAGCACGTGGCACAGATTCTGGACTCTCGGATGAA |
| | CACTAAGTACGACGAGAACGACAAACTGATCCGCGAAGTGAAAGTCATCACCCTGAAGTCC |
| | AAGCTGGTGTCCGATTTCCGGAAGGATTTCCAGTTCTACAAAGTGCGCGAGATCAACAACT |
| | ACCATCACGCCCACGACGCCTACCTGAATGCCGTTGTTGGAACAGCCCTGATCAAAAAGTA |
| | CCCTAAGCTGGAAAGCGAGTTCGTGTACGGCGACTACAAGGTGTACGACGTGCGGAAGATG |
| | ATCGCCAAGAGCGAGCAAGAGATTGGCAAGGCAACCGCCAAGTACTTCTTCTACAGCAACA |
| | TCATGAACTTTTTCAAGACAGAGATCACCCTCGCCAACGGCGAGATCAGAAAGCGGCCTCT |
| | GATCGAGACAAACGGCGAAACCGGCGAGATTGTGTGGGATAAGGGCAGAGACTTTGCCACA |
| | GTGCGGAAAGTGCTGAGCATGCCCCAAGTGAATATCGTGAAGAAAACCGAGGTGCAGACAG |
| | GCGGCTTCAGCAAAGAGTCTATCCTGCCTAAGGGGAACTCCGACAAGCTGATCGCCAGAAA |
| | GAAGGACTGGGACCCCAAGAAATACGGCGGCTTTAACTCTCCCACCGTGGCCTATTCTGTT |
| | CTGGTGGTGGCCAAAGTGGAAAAGGGCAAGTCCAAGAAACTCAAGAGCGTGAAAGAGCTGC |
| | TGGGGATCACCATCATGGAAAGAAGCAGCTTCGAGAAGAATCCGATCGATTTCCTCGAGGC |
| | CAAGGGTTACAAAGAAGTGAAAAAGGACCTGATCATCAAGCTCCCCAAGTACTCCCTGTTC |
| | GAGCTGGAAAACGGCCGGAAGAGAATGCTGGCCTCTGCCGGTGTCCTGCAGAAGGGAAACG |
| | AACTGGCCCTGCCTAGCAAATATGTGAACTTCCTGTACCTGGCCAGCCACTATGAGAAGCT |
| | GAAGGGCAGCCCCGAGGACAATGAGCAAAAGCAGCTGTTTGTGGAACAGCACAAGCACTAC |
| | CTGGACGAGATCATCGAGCAGATCAGCGAGTTTAGCAAGAGAGTGATTCTGGCCGACGCCA |
| | ATCTGGACAAAGTGCTGTCCGCCTACAACAAGCACCGGGACAAGCCTATCAGAGAGCAGGC |
| | CGAGAATATCATCCACCTGTTTACCCTGACCAACCTGGGAGCCCCTGCGGCCTTCAAGTAC |
| | TTTGACACCACCATCAACAGGAAGCAGTACAACACCACCAAAGAGGTGCTGGACGCCACTC |
| | TGATCCGCCAGTCTATCACCGGCCTGTACGAGACACGGATCGACCTGTCTCAACTCGGAGG |
| | CGACGAAGGCGCCGATAAGAGAACCGCCGATGGCTCTGAGTTCGAGAGCCCTAAGAAAAAG |
| | CGCAAAGTGTAG (SEQ ID NO: 485) |
| Inlaid Base | MDKKYSIGLAIGTNSVGWAVITDEYKVPSKKFKVLGNTDRHSIKKNLIGALLFDSGETAEA |
| Editor (IBE) | TRLKRTARRRYTRRKNRICYLQEIFSNEMAKVDDSFFHRLEESFLVEEDKKHERHPIFGNI |
| referenced | VDEVAYHEKYPTIYHLRKKLVDSTDKADLRLIYLALAHMIKFRGHFLIEGDLNPDNSDVDK |
| in FIG. 7 | LFIQLVQTYNQLFEENPINASGVDAKAILSARLSKSRRLENLIAQLPGEKKNGLFGNLIAL |
| (MSP684 | SLGLTPNFKSNFDLAEDAKLQLSKDTYDDDLDNLLAQIGDQYADLFLAAKNLSDAILLSDI |
| monoTadA- | ASQEEFYKFIKPILEKMDGTEELLVKLNREDLLRKQRTFDNGSIPHQIHLGELHAILRRQE |
| TadA7.10 | LRVNTEITKAPLSASMIKRYDEHHQDLTLLKALVRQQLPEKYKEIFFDQSKNGYAGYIDGG |
| (V82S)- | DFYPFLKDNREKIEKILTFRIPYYVGPLARGNSRFAWMTRKSEETITPWNFEEVVDKGASA |
| MQKFRAER*) | QSFIERMTNFDKNLPNEKVLPKHSLLYEYFTVYNELTKVKYVTEGMRKPAFLSGEQKKAIV |
| | DLLFKTNRKVTVKQLKEDYFKKIECFDSVEISGVEDRFNASLGTYHDLLKIIKDKDFLDNE |
| | ENEDILEDIVLTLTLFEDREMIEERLKTYAHLFDDKVMKQLKRRRYTGWGRLSRKLINGIR |
| | DKQSGKTILDFLKSDGFANRNFMQLIHDDSLTFKEDIQKAQVSGQGDSLHEHIANLAGSPA |
| | IKKGILQTVKVVDELVKVMGRHKPENIVIEMARENQTTQKGQKNSRERMKRIEEGIKELGS |
| | QILKEHPVENTQLQNEKLYLYYLQNGRDMYVDQELDINRLSDYDVDHIVPQSFLKDDSIDN |
| | KVLTRSDKNRGKSDNVPSEEVVKKMKNYWRQLLNAKLITQRKFDNLTKAERGGLSELDKAG |
| | FIKRQLVETRQITKHVAQILDSRMNTKYDENDKLIREVKVITLKSKLVSDFRKDFQFYKVR |
| | EINNYHHAHDAYLNAVVGTALIKKYPKLESEFVYGDYKVYDVRKMIAKSEQEIGSSGSETP |
| | GTSESATPESSGSEVEFSHEYWMRHALTLAKRARDEREVPVGAVLVLNNRVIGEGWNRAIG |
| | LHDPTAHAEIMALRQGGLVMQNYRLIDATLYSTFEPCVMCAGAMIHSRIGRVVFGVRNAKT |
| | GAAGSLMDVLHYPGMNHRVEITEGILADECAALLCYFFRMPRQVFNAQKKAQSSTDGKATA |
| | KYFFYSNIMNFFKTEITLANGEIRKRPLIETNGETGEIVWDKGRDFATVRKVLSMPQVNIV |
| | KKTEVQTGGFSKESILPKRNSDKLIARKKDWDPKKYGGFMQPTVAYSVLVVAKVEKGKSKK |
| | LKSVKELLGITIMERSSFEKNPIDFLEAKGYKEVKKDLIIKLPKYSLFELENGRKRMLASA |
| | KFLQKGNELALPSKYVNFLYLASHYEKLKGSPEDNEQKQLFVEQHKHYLDEIIEQISEFSK |
| | RVILADANLDKVLSAYNKHRDKPIREQAENIIHLFTLTNLGAPRAFKYFDTTIARKEYRST |
| | KEVLDATLIHQSITGLYETRIDLSQLGGD (SEQ ID NO: 486) |
| ABE9v1- | MSEVEFSHEYWMRHALTLAKRARDEREVPVGAVLVLNNRVIGEGWNRAIGLHDPTAHAEIM |
| NRCH | ALRQGGLVMQNYRLYDATLYTTFEPCVMCAGAMIHSRIGRVVFGVRNAKTGAAGSLMDVLH |
| (ABE8.20 | HPGMNHRVEITEGILADECAALLCRFYRMPRRVFNAQKKAQSSTDSGGSSGGSSGSETPGT |
| w/ the | SESATPESSGGSSGGSDKKYSIGLAIGTNSVGWAVITDEYKVPSKKFKVLGNTDRHSIKKN |
| alterations | LIGALLFDSGETAEATRLKRTARRRYTRRKNRICYLQEIFSNEMAKVDDSFFHRLEESFLV |
| S82T and | EEDKKHERHPIFGNIVDEVAYHEKYPTIYHLRKKLVDSTDKADLRLIYLALAHMIKFRGHF |
| F149Y in | LIEGDLNPDNSDVDKLFIQLVQTYNQLFEENPINASGVDAKAILSARLSKSRRLENLIAQL |
| the TadA* | PGEKKNGLFGNLIALSLGLTPNFKSNFDLAEDAKLQLSKDTYDDDLDNLLAQIGDQYADLF |
| domain) | LAAKNLSDAILLSDILRVNTEITKAPLSASMVKRYDEHHQDLTLLKALVRQQLPEKYKEIF |
| | FDQSKNGYAGYIDGGASQEEFYKFIKPILEKMDGTEELLVKLNREDLLRKQRTFDNGIIPH |
| | QIHLGELHAILRRQGDFYPFLKDNREKIEKILTFRIPYYVGPLARGNSRFAWMTRKSEETI |
| | TPWNFEEVVDKGASAQSFIERMTNFDKNLPNEKVLPKHSLLYEYFTVYNELTKVKYVTEGM |
| | RKPAFLSGEQKKAIVDLLFKTNRKVTVKQLKEDYFKKIECFDSVEISGVEDRFNASLGTYH |
| | DLLKIIKDKDFLDNEENEDILEDIVLTLTLFEDREMIEERLKTYAHLFDDKVMKQLKRLRY |
| | TGWGRLSRKLINGIRDKQSGKTILDFLKSDGFANRNFMQLIHDDSLTFKEDIQKAQVSGQG |
| | DSLHEHIANLAGSPAIKKGILQTVKVVDELVKVMGGHKPENIVIEMARENQTTQKGQKNSR |
| | ERMKRIEEGIKELGSQILKEHPVENTQLQNEKLYLYYLQNGRDMYVDQELDINRLSDYDVD |
| | HIVPQSFLKDDSIDNKVLTRSDKNRGKSDNVPSEEVVKKMKNYWRQLLNAKLITQRKFDNL |
| | TKAERGGLSELDKAGFIKRQLVETRQITKHVAQILDSRMNTKYDENDKLIREVKVITLKSK |
| | LVSDFRKDFQFYKVREINNYHHAHDAYLNAVVGTALIKKYPKLESEFVYGDYKVYDVRKMI |
| | AKSEQEIGKATAKYFFYSNIMNFFKTEITLANGEIRKRPLIETNGETGEIVWDKGRDFATV |
| | RKVLSMPQVNIVKKTEVQTGGFSKESILPKGNSDKLIARKKDWDPKKYGGFNSPTVAYSVL |
| | VVAKVEKGKSKKLKSVKELLGITIMERSSFEKNPIDFLEAKGYKEVKKDLIIKLPKYSLFE |
| | LENGRKRMLASAGVLQKGNELALPSKYVNFLYLASHYEKLKGSPEDNEQKQLFVEQHKHYL |
| | DEIIEQISEFSKRVILADANLDKVLSAYNKHRDKPIREQAENIIHLFTLTNLGAPAAFKYF |
| | DTTINRKQYNTTKEVLDATLIRQSITGLYETRIDLSQLGGDEGADKRTADGSEFESPKKKR |
| | KV (SEQ ID NO: 487) |
| ABE9v1- | ATGTCCGAAGTCGAGTTTTCCCATGAGTACTGGATGAGACACGCATTGACTCTCGCAAAGA |
| NRCH | GGGCTCGAGATGAACGCGAGGTGCCCGTGGGGGCAGTACTCGTGCTCAACAATCGCGTAAT |
| | CGGCGAAGGTTGGAATAGGGCAATCGGACTCCACGACCCCACTGCACATGCGGAAATCATG |
| | GCCCTTCGACAGGGAGGGCTTGTGATGCAGAATTATCGACTTTATGATGCGACGCTGTACA |
| | CCACGTTTGAACCTTGCGTAATGTGCGCGGGAGCTATGATTCACTCCCGCATTGGACGAGT |
| | TGTATTCGGTGTTCGCAACGCCAAGACGGGTGCCGCAGGTTCACTGATGGACGTGCTGCAT |
| | CATCCAGGCATGAACCACCGGGTAGAAATCACAGAAGGCATATTGGCGGACGAATGTGCGG |
| | CGCTGTTGTGTCGTTTTTATCGCATGCCCAGGCGTGTCTTTAACGCCCAGAAAAAAGCACA |
| | ATCCTCTACTGACTCCGGCGGAAGCAGCGGAGGATCTTCTGGAAGCGAAACCCCAGGCACC |
| | AGCGAGTCTGCCACACCAGAATCATCTGGCGGTAGCTCCGGCGGCAGCGACAAGAAGTATT |
| | CTATCGGACTGGCCATCGGCACCAACTCTGTTGGATGGGCCGTGATCACCGACGAGTACAA |
| | GGTGCCCAGCAAGAAATTCAAGGTGCTGGGCAACACCGACAGGCACAGCATCAAGAAGAAC |
| | CTGATCGGCGCACTGCTGTTCGACTCTGGCGAAACAGCCGAGGCCACCAGACTGAAGAGAA |
| | CAGCCCGCAGACGGTACACCAGAAGAAAGAACCGGATCTGCTACCTCCAAGAGATCTTCAG |
| | CAACGAGATGGCCAAGGTGGACGACAGCTTCTTCCACAGACTGGAAGAGTCCTTCCTGGTG |
| | GAAGAGGACAAGAAGCACGAGAGACACCCCATCTTCGGCAACATCGTGGACGAGGTGGCCT |
| | ACCACGAGAAGTACCCCACCATCTACCACCTGAGAAAGAAACTGGTGGACAGCACCGACAA |
| | GGCCGACCTGAGACTGATCTATCTGGCCCTGGCTCACATGATCAAGTTCCGGGGCCACTTC |
| | CTGATCGAGGGCGACCTGAATCCTGACAACAGCGACGTGGACAAGCTGTTCATCCAGCTGG |
| | TGCAGACCTACAACCAGCTGTTCGAGGAAAACCCCATCAACGCCAGCGGAGTGGATGCCAA |
| | GGCCATCCTGTCTGCCAGACTGAGCAAGAGCAGACGGCTGGAAAATCTGATCGCCCAGCTG |
| | CCTGGCGAGAAGAAGAATGGCCTGTTCGGCAACCTGATTGCCCTGAGCCTGGGCCTGACAC |
| | CTAACTTCAAGAGCAACTTCGACCTGGCCGAGGACGCCAAACTGCAGCTGAGCAAGGACAC |
| | CTACGACGACGACCTGGACAATCTGCTGGCCCAGATCGGCGATCAGTACGCCGACTTGTTT |
| | CTGGCCGCCAAGAATCTGAGCGACGCCATCCTGCTGTCCGACATCCTGAGAGTGAACACCG |
| | AGATCACCAAGGCACCTCTGAGCGCCTCTATGGTCAAGAGATACGACGAGCACCACCAGGA |
| | TCTGACCCTGCTGAAGGCCCTCGTTAGACAGCAGCTGCCAGAGAAGTACAAAGAGATTTTC |
| | TTCGACCAGAGCAAGAACGGCTACGCCGGCTACATTGATGGCGGAGCCAGCCAAGAGGAAT |
| | TCTACAAGTTCATCAAGCCCATCCTCGAGAAGATGGACGGCACCGAGGAACTGCTGGTCAA |
| | GCTGAACAGAGAGGACCTGCTGAGAAAGCAGAGAACCTTCGACAACGGCATCATCCCTCAC |
| | CAGATCCACCTGGGAGAACTGCACGCCATTCTGCGGAGACAAGGGGACTTTTACCCATTCC |
| | TGAAGGACAACCGGGAAAAGATCGAGAAAATCCTGACCTTCAGGATCCCCTACTACGTGGG |
| | ACCACTGGCCAGAGGCAATAGCAGATTCGCCTGGATGACCAGAAAGAGCGAGGAAACCATC |
| | ACTCCCTGGAACTTCGAGGAAGTGGTGGACAAGGGCGCCAGCGCTCAGTCCTTCATCGAGC |
| | GGATGACCAACTTCGATAAGAACCTGCCTAACGAGAAGGTGCTGCCCAAGCACAGCCTGCT |
| | GTACGAGTACTTCACCGTGTACAACGAGCTGACCAAAGTGAAATACGTGACCGAGGGAATG |
| | AGAAAGCCCGCCTTTCTGAGCGGCGAGCAGAAAAAGGCCATCGTGGATCTGCTGTTCAAGA |
| | CCAACCGGAAAGTGACCGTGAAGCAGCTGAAAGAGGACTACTTCAAGAAAATCGAGTGCTT |
| | CGACAGCGTCGAGATCTCCGGCGTGGAAGATCGGTTCAATGCCAGCCTGGGCACATACCAC |
| | GATCTGCTGAAAATTATCAAGGACAAGGACTTCCTGGACAACGAAGAGAACGAGGACATCC |
| | TTGAGGACATCGTGCTGACACTGACCCTGTTTGAGGACAGAGAGATGATCGAGGAACGGCT |
| | GAAAACATACGCCCACCTGTTCGACGACAAAGTGATGAAGCAACTGAAGCGGCTGAGATAC |
| | ACCGGCTGGGGCAGACTGTCTCGGAAGCTGATCAACGGCATCCGGGATAAGCAGTCCGGCA |
| | AGACCATCCTGGACTTTCTGAAGTCCGACGGCTTCGCCAACAGAAACTTCATGCAGCTGAT |
| | TCACGACGACAGCCTCACCTTCAAAGAGGATATCCAGAAAGCCCAGGTGTCCGGCCAGGGC |
| | GATTCTCTGCATGAGCACATTGCCAACCTGGCCGGCTCTCCCGCCATTAAGAAAGGCATCC |
| | TGCAGACAGTGAAGGTGGTGGACGAGCTTGTGAAAGTGATGGGCGGACACAAGCCCGAGAA |
| | CATCGTGATCGAAATGGCCAGAGAGAACCAGACCACACAGAAGGGACAGAAGAACAGCCGC |
| | GAGAGAATGAAGCGGATCGAAGAGGGCATCAAAGAGCTGGGCAGCCAGATCCTGAAAGAAC |
| | ACCCCGTGGAAAACACCCAGCTGCAGAACGAGAAGCTGTACCTGTACTACCTGCAGAATGG |
| | ACGGGATATGTACGTGGACCAAGAGCTGGACATCAACAGACTGTCCGACTACGATGTGGAC |
| | CATATCGTGCCCCAGTCTTTTCTGAAGGACGACTCCATCGACAACAAGGTCCTGACCAGAT |
| | CCGACAAGAATCGGGGCAAGAGCGACAACGTGCCCTCCGAAGAGGTGGTCAAGAAGATGAA |
| | GAACTACTGGCGACAGCTGCTGAACGCCAAGCTGATTACCCAGCGGAAGTTCGACAATCTG |
| | ACCAAGGCCGAAAGAGGCGGCCTGAGCGAACTGGATAAGGCCGGCTTCATCAAGAGACAGC |
| | TGGTGGAAACCCGGCAGATCACAAAGCACGTGGCACAGATTCTGGACTCTCGGATGAACAC |
| | TAAGTACGACGAGAACGACAAACTGATCCGCGAAGTGAAAGTCATCACCCTGAAGTCCAAG |
| | CTGGTGTCCGATTTCCGGAAGGATTTCCAGTTCTACAAAGTGCGCGAGATCAACAACTACC |
| | ATCACGCCCACGACGCCTACCTGAATGCCGTTGTTGGAACAGCCCTGATCAAAAAGTACCC |
| | TAAGCTGGAAAGCGAGTTCGTGTACGGCGACTACAAGGTGTACGACGTGCGGAAGATGATC |
| | GCCAAGAGCGAGCAAGAGATTGGCAAGGCAACCGCCAAGTACTTCTTCTACAGCAACATCA |
| | TGAACTTTTTCAAGACAGAGATCACCCTCGCCAACGGCGAGATCAGAAAGCGGCCTCTGAT |
| | CGAGACAAACGGCGAAACCGGCGAGATTGTGTGGGATAAGGGCAGAGACTTTGCCACAGTG |
| | CGGAAAGTGCTGAGCATGCCCCAAGTGAATATCGTGAAGAAAACCGAGGTGCAGACAGGCG |
| | GCTTCAGCAAAGAGTCTATCCTGCCTAAGGGGAACTCCGACAAGCTGATCGCCAGAAAGAA |
| | GGACTGGGACCCCAAGAAATACGGCGGCTTTAACTCTCCCACCGTGGCCTATTCTGTTCTG |
| | GTGGTGGCCAAAGTGGAAAAGGGCAAGTCCAAGAAACTCAAGAGCGTGAAAGAGCTGCTGG |
| | GGATCACCATCATGGAAAGAAGCAGCTTCGAGAAGAATCCGATCGATTTCCTCGAGGCCAA |
| | GGGTTACAAAGAAGTGAAAAAGGACCTGATCATCAAGCTCCCCAAGTACTCCCTGTTCGAG |
| | CTGGAAAACGGCCGGAAGAGAATGCTGGCCTCTGCCGGTGTCCTGCAGAAGGGAAACGAAC |
| | TGGCCCTGCCTAGCAAATATGTGAACTTCCTGTACCTGGCCAGCCACTATGAGAAGCTGAA |
| | GGGCAGCCCCGAGGACAATGAGCAAAAGCAGCTGTTTGTGGAACAGCACAAGCACTACCTG |
| | GACGAGATCATCGAGCAGATCAGCGAGTTTAGCAAGAGAGTGATTCTGGCCGACGCCAATC |
| | TGGACAAAGTGCTGTCCGCCTACAACAAGCACCGGGACAAGCCTATCAGAGAGCAGGCCGA |
| | GAATATCATCCACCTGTTTACCCTGACCAACCTGGGAGCCCCTGCGGCCTTCAAGTACTTT |
| | GACACCACCATCAACAGGAAGCAGTACAACACCACCAAAGAGGTGCTGGACGCCACTCTGA |
| | TCCGCCAGTCTATCACCGGCCTGTACGAGACACGGATCGACCTGTCTCAACTCGGAGGCGA |
| | CGAAGGCGCCGATAAGAGAACCGCCGATGGCTCTGAGTTCGAGAGCCCTAAGAAAAAGCGC |
| | AAAGTGTAG (SEQ ID NO: 488) |
| ABE9v2- | MSEVEFSHEYWMRHALTLAKRARDEREVPVGAVLVLNNRVIGEGWNRAIGLHDPTAHAEIM |
| NRCH | ALRQGGLVMQNYRLYDATLYTTFEPCVMCAGAMIHSRIGRVVFGVRNAKTGAAGSLMDVLH |
| (ABE8.20 | HPGMNHRVEITEGILADECAALLCDFYRMPRRVFNAQKKAQSSINSGGSSGGSSGSETPGT |
| w/ the | SESATPESSGGSSGGSDKKYSIGLAIGTNSVGWAVITDEYKVPSKKFKVLGNTDRHSIKKN |
| alterations | LIGALLFDSGETAEATRLKRTARRRYTRRKNRICYLQEIFSNEMAKVDDSFFHRLEESFLV |
| Y147D, | EEDKKHERHPIFGNIVDEVAYHEKYPTIYHLRKKLVDSTDKADLRLIYLALAHMIKFRGHF |
| F149Y, | LIEGDLNPDNSDVDKLFIQLVQTYNQLFEENPINASGVDAKAILSARLSKSRRLENLIAQL |
| T166I, | PGEKKNGLFGNLIALSLGLTPNFKSNFDLAEDAKLQLSKDTYDDDLDNLLAQIGDQYADLF |
| D167N and | LAAKNLSDAILLSDILRVNTEITKAPLSASMVKRYDEHHQDLTLLKALVRQQLPEKYKEIF |
| S82T in the | FDQSKNGYAGYIDGGASQEEFYKFIKPILEKMDGTEELLVKLNREDLLRKQRTFDNGIIPH |
| TadA* | QIHLGELHAILRRQGDFYPFLKDNREKIEKILTFRIPYYVGPLARGNSRFAWMTRKSEETI |
| domain) | TPWNFEEVVDKGASAQSFIERMTNFDKNLPNEKVLPKHSLLYEYFTVYNELTKVKYVTEGM |
| | RKPAFLSGEQKKAIVDLLFKTNRKVTVKQLKEDYFKKIECFDSVEISGVEDRFNASLGTYH |
| | DLLKIIKDKDFLDNEENEDILEDIVLTLTLFEDREMIEERLKTYAHLFDDKVMKQLKRLRY |
| | TGWGRLSRKLINGIRDKQSGKTILDFLKSDGFANRNFMQLIHDDSLTFKEDIQKAQVSGQG |
| | DSLHEHIANLAGSPAIKKGILQTVKVVDELVKVMGGHKPENIVIEMARENQTTQKGQKNSR |
| | ERMKRIEEGIKELGSQILKEHPVENTQLQNEKLYLYYLQNGRDMYVDQELDINRLSDYDVD |
| | HIVPQSFLKDDSIDNKVLTRSDKNRGKSDNVPSEEVVKKMKNYWRQLLNAKLITQRKFDNL |
| | TKAERGGLSELDKAGFIKRQLVETRQITKHVAQILDSRMNTKYDENDKLIREVKVITLKSK |
| | LVSDFRKDFQFYKVREINNYHHAHDAYLNAVVGTALIKKYPKLESEFVYGDYKVYDVRKMI |
| | AKSEQEIGKATAKYFFYSNIMNFFKTEITLANGEIRKRPLIETNGETGEIVWDKGRDFATV |
| | RKVLSMPQVNIVKKTEVQTGGFSKESILPKGNSDKLIARKKDWDPKKYGGFNSPTVAYSVL |
| | VVAKVEKGKSKKLKSVKELLGITIMERSSFEKNPIDFLEAKGYKEVKKDLIIKLPKYSLFE |
| | LENGRKRMLASAGVLQKGNELALPSKYVNFLYLASHYEKLKGSPEDNEQKQLFVEQHKHYL |
| | DEIIEQISEFSKRVILADANLDKVLSAYNKHRDKPIREQAENIIHLFTLTNLGAPAAFKYF |
| | DTTINRKQYNTTKEVLDATLIRQSITGLYETRIDLSQLGGDEGADKRTADGSEFESPKKKR |
| | KV (SEQ ID NO: 489) |
| ABE9v2- | ATGTCCGAAGTCGAGTTTTCCCATGAGTACTGGATGAGACACGCATTGACTCTCGCAAAGA |
| NRCH | GGGCTCGAGATGAACGCGAGGTGCCCGTGGGGGCAGTACTCGTGCTCAACAATCGCGTAAT |
| | CGGCGAAGGTTGGAATAGGGCAATCGGACTCCACGACCCCACTGCACATGCGGAAATCATG |
| | GCCCTTCGACAGGGAGGGCTTGTGATGCAGAATTATCGACTTTATGATGCGACGCTGTACA |
| | CCACGTTTGAACCTTGCGTAATGTGCGCGGGAGCTATGATTCACTCCCGCATTGGACGAGT |
| | TGTATTCGGTGTTCGCAACGCCAAGACGGGTGCCGCAGGTTCACTGATGGACGTGCTGCAT |
| | CATCCAGGCATGAACCACCGGGTAGAAATCACAGAAGGCATATTGGCGGACGAATGTGCGG |
| | CGCTGTTGTGTGACTTTTATCGCATGCCCAGGCGTGTCTTTAACGCCCAGAAAAAAGCACA |
| | ATCCTCTATAAACTCCGGCGGAAGCAGCGGAGGATCTTCTGGAAGCGAAACCCCAGGCACC |
| | AGCGAGTCTGCCACACCAGAATCATCTGGCGGTAGCTCCGGCGGCAGCGACAAGAAGTATT |
| | CTATCGGACTGGCCATCGGCACCAACTCTGTTGGATGGGCCGTGATCACCGACGAGTACAA |
| | GGTGCCCAGCAAGAAATTCAAGGTGCTGGGCAACACCGACAGGCACAGCATCAAGAAGAAC |
| | CTGATCGGCGCACTGCTGTTCGACTCTGGCGAAACAGCCGAGGCCACCAGACTGAAGAGAA |
| | CAGCCCGCAGACGGTACACCAGAAGAAAGAACCGGATCTGCTACCTCCAAGAGATCTTCAG |
| | CAACGAGATGGCCAAGGTGGACGACAGCTTCTTCCACAGACTGGAAGAGTCCTTCCTGGTG |
| | GAAGAGGACAAGAAGCACGAGAGACACCCCATCTTCGGCAACATCGTGGACGAGGTGGCCT |
| | ACCACGAGAAGTACCCCACCATCTACCACCTGAGAAAGAAACTGGTGGACAGCACCGACAA |
| | GGCCGACCTGAGACTGATCTATCTGGCCCTGGCTCACATGATCAAGTTCCGGGGCCACTTC |
| | CTGATCGAGGGCGACCTGAATCCTGACAACAGCGACGTGGACAAGCTGTTCATCCAGCTGG |
| | TGCAGACCTACAACCAGCTGTTCGAGGAAAACCCCATCAACGCCAGCGGAGTGGATGCCAA |
| | GGCCATCCTGTCTGCCAGACTGAGCAAGAGCAGACGGCTGGAAAATCTGATCGCCCAGCTG |
| | CCTGGCGAGAAGAAGAATGGCCTGTTCGGCAACCTGATTGCCCTGAGCCTGGGCCTGACAC |
| | CTAACTTCAAGAGCAACTTCGACCTGGCCGAGGACGCCAAACTGCAGCTGAGCAAGGACAC |
| | CTACGACGACGACCTGGACAATCTGCTGGCCCAGATCGGCGATCAGTACGCCGACTTGTTT |
| | CTGGCCGCCAAGAATCTGAGCGACGCCATCCTGCTGTCCGACATCCTGAGAGTGAACACCG |
| | AGATCACCAAGGCACCTCTGAGCGCCTCTATGGTCAAGAGATACGACGAGCACCACCAGGA |
| | TCTGACCCTGCTGAAGGCCCTCGTTAGACAGCAGCTGCCAGAGAAGTACAAAGAGATTTTC |
| | TTCGACCAGAGCAAGAACGGCTACGCCGGCTACATTGATGGCGGAGCCAGCCAAGAGGAAT |
| | TCTACAAGTTCATCAAGCCCATCCTCGAGAAGATGGACGGCACCGAGGAACTGCTGGTCAA |
| | GCTGAACAGAGAGGACCTGCTGAGAAAGCAGAGAACCTTCGACAACGGCATCATCCCTCAC |
| | CAGATCCACCTGGGAGAACTGCACGCCATTCTGCGGAGACAAGGGGACTTTTACCCATTCC |
| | TGAAGGACAACCGGGAAAAGATCGAGAAAATCCTGACCTTCAGGATCCCCTACTACGTGGG |
| | ACCACTGGCCAGAGGCAATAGCAGATTCGCCTGGATGACCAGAAAGAGCGAGGAAACCATC |
| | ACTCCCTGGAACTTCGAGGAAGTGGTGGACAAGGGCGCCAGCGCTCAGTCCTTCATCGAGC |
| | GGATGACCAACTTCGATAAGAACCTGCCTAACGAGAAGGTGCTGCCCAAGCACAGCCTGCT |
| | GTACGAGTACTTCACCGTGTACAACGAGCTGACCAAAGTGAAATACGTGACCGAGGGAATG |
| | AGAAAGCCCGCCTTTCTGAGCGGCGAGCAGAAAAAGGCCATCGTGGATCTGCTGTTCAAGA |
| | CCAACCGGAAAGTGACCGTGAAGCAGCTGAAAGAGGACTACTTCAAGAAAATCGAGTGCTT |
| | CGACAGCGTCGAGATCTCCGGCGTGGAAGATCGGTTCAATGCCAGCCTGGGCACATACCAC |
| | GATCTGCTGAAAATTATCAAGGACAAGGACTTCCTGGACAACGAAGAGAACGAGGACATCC |
| | TTGAGGACATCGTGCTGACACTGACCCTGTTTGAGGACAGAGAGATGATCGAGGAACGGCT |
| | GAAAACATACGCCCACCTGTTCGACGACAAAGTGATGAAGCAACTGAAGCGGCTGAGATAC |
| | ACCGGCTGGGGCAGACTGTCTCGGAAGCTGATCAACGGCATCCGGGATAAGCAGTCCGGCA |
| | AGACCATCCTGGACTTTCTGAAGTCCGACGGCTTCGCCAACAGAAACTTCATGCAGCTGAT |
| | TCACGACGACAGCCTCACCTTCAAAGAGGATATCCAGAAAGCCCAGGTGTCCGGCCAGGGC |
| | GATTCTCTGCATGAGCACATTGCCAACCTGGCCGGCTCTCCCGCCATTAAGAAAGGCATCC |
| | TGCAGACAGTGAAGGTGGTGGACGAGCTTGTGAAAGTGATGGGCGGACACAAGCCCGAGAA |
| | CATCGTGATCGAAATGGCCAGAGAGAACCAGACCACACAGAAGGGACAGAAGAACAGCCGC |
| | GAGAGAATGAAGCGGATCGAAGAGGGCATCAAAGAGCTGGGCAGCCAGATCCTGAAAGAAC |
| | ACCCCGTGGAAAACACCCAGCTGCAGAACGAGAAGCTGTACCTGTACTACCTGCAGAATGG |
| | ACGGGATATGTACGTGGACCAAGAGCTGGACATCAACAGACTGTCCGACTACGATGTGGAC |
| | CATATCGTGCCCCAGTCTTTTCTGAAGGACGACTCCATCGACAACAAGGTCCTGACCAGAT |
| | CCGACAAGAATCGGGGCAAGAGCGACAACGTGCCCTCCGAAGAGGTGGTCAAGAAGATGAA |
| | GAACTACTGGCGACAGCTGCTGAACGCCAAGCTGATTACCCAGCGGAAGTTCGACAATCTG |
| | ACCAAGGCCGAAAGAGGCGGCCTGAGCGAACTGGATAAGGCCGGCTTCATCAAGAGACAGC |
| | TGGTGGAAACCCGGCAGATCACAAAGCACGTGGCACAGATTCTGGACTCTCGGATGAACAC |
| | TAAGTACGACGAGAACGACAAACTGATCCGCGAAGTGAAAGTCATCACCCTGAAGTCCAAG |
| | CTGGTGTCCGATTTCCGGAAGGATTTCCAGTTCTACAAAGTGCGCGAGATCAACAACTACC |
| | ATCACGCCCACGACGCCTACCTGAATGCCGTTGTTGGAACAGCCCTGATCAAAAAGTACCC |
| | TAAGCTGGAAAGCGAGTTCGTGTACGGCGACTACAAGGTGTACGACGTGCGGAAGATGATC |
| | GCCAAGAGCGAGCAAGAGATTGGCAAGGCAACCGCCAAGTACTTCTTCTACAGCAACATCA |
| | TGAACTTTTTCAAGACAGAGATCACCCTCGCCAACGGCGAGATCAGAAAGCGGCCTCTGAT |
| | CGAGACAAACGGCGAAACCGGCGAGATTGTGTGGGATAAGGGCAGAGACTTTGCCACAGTG |
| | CGGAAAGTGCTGAGCATGCCCCAAGTGAATATCGTGAAGAAAACCGAGGTGCAGACAGGCG |
| | GCTTCAGCAAAGAGTCTATCCTGCCTAAGGGGAACTCCGACAAGCTGATCGCCAGAAAGAA |
| | GGACTGGGACCCCAAGAAATACGGCGGCTTTAACTCTCCCACCGTGGCCTATTCTGTTCTG |
| | GTGGTGGCCAAAGTGGAAAAGGGCAAGTCCAAGAAACTCAAGAGCGTGAAAGAGCTGCTGG |
| | GGATCACCATCATGGAAAGAAGCAGCTTCGAGAAGAATCCGATCGATTTCCTCGAGGCCAA |
| | GGGTTACAAAGAAGTGAAAAAGGACCTGATCATCAAGCTCCCCAAGTACTCCCTGTTCGAG |
| | CTGGAAAACGGCCGGAAGAGAATGCTGGCCTCTGCCGGTGTCCTGCAGAAGGGAAACGAAC |
| | TGGCCCTGCCTAGCAAATATGTGAACTTCCTGTACCTGGCCAGCCACTATGAGAAGCTGAA |
| | GGGCAGCCCCGAGGACAATGAGCAAAAGCAGCTGTTTGTGGAACAGCACAAGCACTACCTG |
| | GACGAGATCATCGAGCAGATCAGCGAGTTTAGCAAGAGAGTGATTCTGGCCGACGCCAATC |
| | TGGACAAAGTGCTGTCCGCCTACAACAAGCACCGGGACAAGCCTATCAGAGAGCAGGCCGA |
| | GAATATCATCCACCTGTTTACCCTGACCAACCTGGGAGCCCCTGCGGCCTTCAAGTACTTT |
| | GACACCACCATCAACAGGAAGCAGTACAACACCACCAAAGAGGTGCTGGACGCCACTCTGA |
| | TCCGCCAGTCTATCACCGGCCTGTACGAGACACGGATCGACCTGTCTCAACTCGGAGGCGA |
| | CGAAGGCGCCGATAAGAGAACCGCCGATGGCTCTGAGTTCGAGAGCCCTAAGAAAAAGCGC |
| | AAAGTGTAG (SEQ ID NO: 490) |

[0383] In some cases (e.g., ABE9v2) the mRNA encoding the base editor contains a 5′ untranslated region (UTR) with the nucleotide sequence TAATDKACCACGNDYTTTGAACCTTGCGTAATGDKACGTGGNDYTGTACAGCGTCGCATCAT AAAGTACGACTCACTATAAGGAAATAAGAGAGAAAAGAAGAGTAAGAAGAAATATAAGAGCC ACC (SEQ ID NO: 491) and a 3′ untranslated region (UTR) with the nucleotide sequence TTAATTAAGCTGCCTTCTGCGGGGCTTGCCTTCTGGCCATGCCCTTCTTCTCTCCCTTGCAC CTGTACCTCTTGGTCTTTGAATAAAGCCTGAGTAGGAAGAAAAAAAAAAAAAAAAAAAAAAAA AAAAAAAAAAAAAAAAAAAAAAAAAAAAAAAAAAAAAAAAAAAAAAAAA AAAAAAAAAAAAAAAAAAAAAAAAAAAAAAA (SEQ ID NO: 492). For example, mRNA2518 transcribed from the plasmid pDKL-208 and encoding ABE9v2 had the following nucleotide sequence:

(SEQ ID NO: 493)
TAATDKACCACGNDYTTTGAACCTTGCGTAATGDKACGTGGNDYTGTACAGCGTCGCATCAT
AAAGTACGACTCACTATAAGGAAATAAGAGAGAAAAGAAGAGTAAGAAGAAATATAAGAGCC
ACCATGTCCGAAGTCGAGTTTTCCCATGAGTACTGGATGAGACACGCATTGACTCTCGCAAA
GAGGGCTCGAGATGAACGCGAGGTGCCCGTGGGGGCAGTACTCGTGCTCAACAATCGCGTAA
TCGGCGAAGGTTGGAATAGGGCAATCGGACTCCACGACCCCACTGCACATGCGGAAATCATG
GCCCTTCGACAGGGAGGGCTTGTGATGCAGAATTATCGACTTTATGATGCGACGCTGTACAC
CACGTTTGAACCTTGCGTAATGTGCGCGGGAGCTATGATTCACTCCCGCATTGGACGAGTTG
TATTCGGTGTTCGCAACGCCAAGACGGGTGCCGCAGGTTCACTGATGGACGTGCTGCATCAT
CCAGGCATGAACCACCGGGTAGAAATCACAGAAGGCATATTGGCGGACGAATGTGCGGCGCT
GTTGTGTGACTTTTATCGCATGCCCAGGCGTGTCTTTAACGCCCAGAAAAAAGCACAATCCT
CTATAAACTCCGGCGGAAGCAGCGGAGGATCTTCTGGAAGCGAAACCCCAGGCACCAGCGAG
TCTGCCACACCAGAATCATCTGGCGGTAGCTCCGGCGGCAGCGACAAGAAGTATTCTATCGG
ACTGGCCATCGGCACCAACTCTGTTGGATGGGCCGTGATCACCGACGAGTACAAGGTGCCCA
GCAAGAAATTCAAGGTGCTGGGCAACACCGACAGGCACAGCATCAAGAAGAACCTGATCGGC
GCACTGCTGTTCGACTCTGGCGAAACAGCCGAGGCCACCAGACTGAAGAGAACAGCCCGCAG
ACGGTACACCAGAAGAAAGAACCGGATCTGCTACCTCCAAGAGATCTTCAGCAACGAGATGG
CCAAGGTGGACGACAGCTTCTTCCACAGACTGGAAGAGTCCTTCCTGGTGGAAGAGGACAAG
AAGCACGAGAGACACCCCATCTTCGGCAACATCGTGGACGAGGTGGCCTACCACGAGAAGTA
CCCCACCATCTACCACCTGAGAAAGAAACTGGTGGACAGCACCGACAAGGCCGACCTGAGAC
TGATCTATCTGGCCCTGGCTCACATGATCAAGTTCCGGGGCCACTTCCTGATCGAGGGCGAC
CTGAATCCTGACAACAGCGACGTGGACAAGCTGTTCATCCAGCTGGTGCAGACCTACAACCA
GCTGTTCGAGGAAAACCCCATCAACGCCAGCGGAGTGGATGCCAAGGCCATCCTGTCTGCCA
GACTGAGCAAGAGCAGACGGCTGGAAAATCTGATCGCCCAGCTGCCTGGCGAGAAGAAGAAT
GGCCTGTTCGGCAACCTGATTGCCCTGAGCCTGGGCCTGACACCTAACTTCAAGAGCAACTT
CGACCTGGCCGAGGACGCCAAACTGCAGCTGAGCAAGGACACCTACGACGACGACCTGGACA
ATCTGCTGGCCCAGATCGGCGATCAGTACGCCGACTTGTTTCTGGCCGCCAAGAATCTGAGC
GACGCCATCCTGCTGTCCGACATCCTGAGAGTGAACACCGAGATCACCAAGGCACCTCTGAG
CGCCTCTATGGTCAAGAGATACGACGAGCACCACCAGGATCTGACCCTGCTGAAGGCCCTCG
TTAGACAGCAGCTGCCAGAGAAGTACAAAGAGATTTTCTTCGACCAGAGCAAGAACGGCTAC
GCCGGCTACATTGATGGCGGAGCCAGCCAAGAGGAATTCTACAAGTTCATCAAGCCCATCCT
CGAGAAGATGGACGGCACCGAGGAACTGCTGGTCAAGCTGAACAGAGAGGACCTGCTGAGAA
AGCAGAGAACCTTCGACAACGGCATCATCCCTCACCAGATCCACCTGGGAGAACTGCACGCC
ATTCTGCGGAGACAAGGGGACTTTTACCCATTCCTGAAGGACAACCGGGAAAAGATCGAGAA
AATCCTGACCTTCAGGATCCCCTACTACGTGGGACCACTGGCCAGAGGCAATAGCAGATTCG
CCTGGATGACCAGAAAGAGCGAGGAAACCATCACTCCCTGGAACTTCGAGGAAGTGGTGGAC
AAGGGCGCCAGCGCTCAGTCCTTCATCGAGCGGATGACCAACTTCGATAAGAACCTGCCTAA
CGAGAAGGTGCTGCCCAAGCACAGCCTGCTGTACGAGTACTTCACCGTGTACAACGAGCTGA
CCAAAGTGAAATACGTGACCGAGGGAATGAGAAAGCCCGCCTTTCTGAGCGGCGAGCAGAAA
AAGGCCATCGTGGATCTGCTGTTCAAGACCAACCGGAAAGTGACCGTGAAGCAGCTGAAAGA
GGACTACTTCAAGAAAATCGAGTGCTTCGACAGCGTCGAGATCTCCGGCGTGGAAGATCGGT
TCAATGCCAGCCTGGGCACATACCACGATCTGCTGAAAATTATCAAGGACAAGGACTTCCTG
GACAACGAAGAGAACGAGGACATCCTTGAGGACATCGTGCTGACACTGACCCTGTTTGAGGA
CAGAGAGATGATCGAGGAACGGCTGAAAACATACGCCCACCTGTTCGACGACAAAGTGATGA
AGCAACTGAAGCGGCTGAGATACACCGGCTGGGGCAGACTGTCTCGGAAGCTGATCAACGGC
ATCCGGGATAAGCAGTCCGGCAAGACCATCCTGGACTTTCTGAAGTCCGACGGCTTCGCCAA
CAGAAACTTCATGCAGCTGATTCACGACGACAGCCTCACCTTCAAAGAGGATATCCAGAAAG
CCCAGGTGTCCGGCCAGGGCGATTCTCTGCATGAGCACATTGCCAACCTGGCCGGCTCTCCC
GCCATTAAGAAAGGCATCCTGCAGACAGTGAAGGTGGTGGACGAGCTTGTGAAAGTGATGGG
CGGACACAAGCCCGAGAACATCGTGATCGAAATGGCCAGAGAGAACCAGACCACACAGAAGG
GACAGAAGAACAGCCGCGAGAGAATGAAGCGGATCGAAGAGGGCATCAAAGAGCTGGGCAGC
CAGATCCTGAAAGAACACCCCGTGGAAAACACCCAGCTGCAGAACGAGAAGCTGTACCTGTA
CTACCTGCAGAATGGACGGGATATGTACGTGGACCAAGAGCTGGACATCAACAGACTGTCCG
ACTACGATGTGGACCATATCGTGCCCCAGTCTTTTCTGAAGGACGACTCCATCGACAACAAG
GTCCTGACCAGATCCGACAAGAATCGGGGCAAGAGCGACAACGTGCCCTCCGAAGAGGTGGT
CAAGAAGATGAAGAACTACTGGCGACAGCTGCTGAACGCCAAGCTGATTACCCAGCGGAAGT
TCGACAATCTGACCAAGGCCGAAAGAGGCGGCCTGAGCGAACTGGATAAGGCCGGCTTCATC
AAGAGACAGCTGGTGGAAACCCGGCAGATCACAAAGCACGTGGCACAGATTCTGGACTCTCG
GATGAACACTAAGTACGACGAGAACGACAAACTGATCCGCGAAGTGAAAGTCATCACCCTGA
AGTCCAAGCTGGTGTCCGATTTCCGGAAGGATTTCCAGTTCTACAAAGTGCGCGAGATCAAC
AACTACCATCACGCCCACGACGCCTACCTGAATGCCGTTGTTGGAACAGCCCTGATCAAAAA
GTACCCTAAGCTGGAAAGCGAGTTCGTGTACGGCGACTACAAGGTGTACGACGTGCGGAAGA
TGATCGCCAAGAGCGAGCAAGAGATTGGCAAGGCAACCGCCAAGTACTTCTTCTACAGCAAC
ATCATGAACTTTTTCAAGACAGAGATCACCCTCGCCAACGGCGAGATCAGAAAGCGGCCTCT
GATCGAGACAAACGGCGAAACCGGCGAGATTGTGTGGGATAAGGGCAGAGACTTTGCCACAG
TGCGGAAAGTGCTGAGCATGCCCCAAGTGAATATCGTGAAGAAAACCGAGGTGCAGACAGGC
GGCTTCAGCAAAGAGTCTATCCTGCCTAAGGGGAACTCCGACAAGCTGATCGCCAGAAAGAA
GGACTGGGACCCCAAGAAATACGGCGGCTTTAACTCTCCCACCGTGGCCTATTCTGTTCTGG
TGGTGGCCAAAGTGGAAAAGGGCAAGTCCAAGAAACTCAAGAGCGTGAAAGAGCTGCTGGGG
ATCACCATCATGGAAAGAAGCAGCTTCGAGAAGAATCCGATCGATTTCCTCGAGGCCAAGGG
TTACAAAGAAGTGAAAAAGGACCTGATCATCAAGCTCCCCAAGTACTCCCTGTTCGAGCTGG
AAAACGGCCGGAAGAGAATGCTGGCCTCTGCCGGTGTCCTGCAGAAGGGAAACGAACTGGCC
CTGCCTAGCAAATATGTGAACTTCCTGTACCTGGCCAGCCACTATGAGAAGCTGAAGGGCAG
CCCCGAGGACAATGAGCAAAAGCAGCTGTTTGTGGAACAGCACAAGCACTACCTGGACGAGA
TCATCGAGCAGATCAGCGAGTTTAGCAAGAGAGTGATTCTGGCCGACGCCAATCTGGACAAA
GTGCTGTCCGCCTACAACAAGCACCGGGACAAGCCTATCAGAGAGCAGGCCGAGAATATCAT
CCACCTGTTTACCCTGACCAACCTGGGAGCCCCTGCGGCCTTCAAGTACTTTGACACCACCA
TCAACAGGAAGCAGTACAACACCACCAAAGAGGTGCTGGACGCCACTCTGATCCGCCAGTCT
ATCACCGGCCTGTACGAGACACGGATCGACCTGTCTCAACTCGGAGGCGACGAAGGCGCCGA
TAAGAGAACCGCCGATGGCTCTGAGTTCGAGAGCCCTAAGAAAAAGCGCAAAGTGTAGTTAA
TTAAGCTGCCTTCTGCGGGGCTTGCCTTCTGGCCATGCCCTTCTTCTCTCCCTTGCACCTGT
ACCTCTTGGTCTTTGAATAAAGCCTGAGTAGGAAGAAAAAAAAAAAAAAAAAAAAAAAAAAA
AAAAAAAAAAAAAAAAAAAAAAAAAAAAAAAAAAAAAAAAAAAAAAAAAAAAAAAAAAAAAA
AAAAAAAAAAAAAAAAAAAAAAAAAAA.

### General Methods

[0384] All cloning was conducted via USER enzyme (New England Biolabs) cloning methods (see Geu-Flores et al., USER fusion: a rapid and efficient method for simultaneous fusion and cloning of multiple PCR products. Nucleic Acids Res 35, e55, doi:10.1093/nar/gkm106 (2007)) and templates for PCR amplification were purchased as bacterial or mammalian codon optimized gene fragments (GeneArt). Vectors created were transformed into Mach T1^{R} Competent Cells (ThermoFisher Scientific) and maintained at −80 C for long-term storage. All primers used in this work were purchased from Integrated DNA Technologies and PCRS were carried out using either Phusion U DNA Polymerase Green MultiPlex PCR Master Mix (ThermoFisher) or Q5 Hot Start High-Fidelity 2× Master Mix (New England Biolabs). All plasmids used in this work were freshly prepared from 50 mL of Mach1 culture using ZymoPURE Plasmid Midiprep (Zymo Research Corporation) which involves an endotoxin removal procedure. Molecular biology grade, Hyclone water (GE Healthcare Life Sciences) was used in all assays, transfections, and PCR reactions to ensure exclusion of DNAse activity.

[0385] Nucleotide sequences of sgRNAs used for Hek293T mammalian cell transfection are provided in Table 10 below. The 20-nt target protospacer is shown in bold font. When a target DNA sequence did not start with a ‘G,’ a ‘G’ was added to the 5′ end of the primer since it has been established that the human U6 promoter prefers a ‘G’ at the transcription start site (see Cong, L. et al., Multiplex genome engineering using CRISPR/Cas systems. Science 339, 819-823, doi:10.1126/science.1231143 (2013)). The pFYF sgRNA plasmid described previously was used as a template for PCR amplification.

TABLE 10
Sequences of sgRNAs used for Hek293T mammalian cell transfection.

| | | SEQ ID | Cas9 and | |
|---|---|---|---|---|
| Site | Spacer Sequence | NO. | Scaffold | PAM |
| 1 | GAACACAAAGCAUAGACUGC | 494 | S. pyogenes | NGG |
| 2 | GGGAAAGACCCAGCAUCCGU | 495 | S. pyogenes | NGG |
| 3 | GCUCCCAUCACAUCAACCGG | 496 | S. pyogenes | NGG |
| 4 | GGUGAGUGAGUGUGUGCGUG | 497 | S. pyogenes | NGG |
| 5 | GGCUUCAGGUUCUAAAUGAG | 498 | S. pyogenes | NGG |
| 6 | GCAGAGAGUCGCCGUCUCCA | 499 | S. pyogenes | NGG |
| 7 | GUGUAAGACCUCAAAAGCAC | 500 | S. pyogenes | NGG |
| 8 | GAUGAGAAGGAGAAGUUCUU | 501 | S. pyogenes | NGG |
| 9 | GAGGACAAAGUACAAACGGC | 502 | S. pyogenes | AGA |
| 10 | GCCACCACAGGGAAGCUGGG | 503 | S. pyogenes | TGA |
| 11 | GCUCUCAGGCCCUGUCCGCA | 504 | S. pyogenes | CGT |
| 12 | GAGCAAAUACCAGAGAUAAG | 505 | S. pyogenes | AGA |
| 13 | GAUCAGGAAAUAGAGCCACA | 506 | S. pyogenes | GGC |
| 14 | GCCCAUCCCUGAGUCCAGCG | 507 | S. pyogenes | AGC |
| 15 | GAACACGAAGACAUCUGAAGGUA | 508 | S. aureus | TTGAAT |
| 16 | GAUUUACAGCCUGGCCUUUGGGG | 509 | S. aureus | TCGGGT |
| 17 | GGAGAGAAAGAGAAGUUGAUUG | 510 | S. aureus | ATGGGT |
| 18 | GAGGGUGAGGGAUGAGAUAAUG | 511 | S. aureus | ATGAGT |
| 19 | GGUGGAGGAGGGUGCAUGGGGU | 512 | S. aureus | CAGAAT |
| 20 | GCUGUUGCAUGAGGAAAGGGAC | 513 | S. aureus | TAGAGT |
| HEK2 | GAACACAAAGCAUAGACUGC | 494 | S. pyogenes | CGG |
| HEK3 | GGCCCAGACUGAGCACGUGA | 515 | S. pyogenes | TGG |
| HEK4 | GGCACUGCGGCUGGAGGUGG | 516 | S. pyogenes | GGG |
| LDLR | GCAGAGCACUGGAAUUCGUCA | 517 | S. pyogenes | GGG |

sgRNA scaffold sequences referenced in Table 10 were as follows:

S. pyogenes:
(SEQ ID NO: 319)
GUUUUAGAGCUAGAAAUAGCAAGUUAAAAUAAGGCUAGUCCGUUAUCAA
CUUGAAAAAGUGGCACCGAGUCGGUGC
S. aureus:
(SEQ ID NO: 320)
GUUUUAGUACUCUGUAAUGAAAAUUACAGAAUCUACUAAAACAAGGCAA
AAUGCCGUGUUUAUCUCGUCAACUUGUUGGCGAGA

### Generation of Input Bacterial TadA* Libraries for Directed Evolution

[0386] The TadA*8.0 library was designed to encode all 20 amino acids at each amino acid position in the TadA*7.10 open reading frame (Gaudelli, N. M. et al., Programmable base editing of A*T to G*C in genomic DNA without DNA cleavage. Nature 551, 464-471, doi:10.1038/nature24644 (2017)). Each TadA*8.0 library member contained about 1-2 new coding mutations and was chemically synthesized and purchased from Ranomics Inc (Toronto, Canada). The TadA*8.0 library was PCR amplified with Phusion U Green MultiPlex PCR Master Mix and USER-assembled into a bacterial vector optimized for ABE directed evolution (Gaudelli, N. M. et al., Programmable base editing of A*T to G*C in genomic DNA without DNA cleavage. Nature 551, 464-471, doi:10.1038/nature24644 (2017)).

### Bacterial Evolution of TadA Variants

[0387] Directed evolution of ABE containing the TadA*8 library was conducted as previously described (Gaudelli, N. M. et al., Programmable base editing of A*T to G*C in genomic DNA without DNA cleavage. Nature 551, 464-471, doi:10.1038/nature24644 (2017)) with the following changes: i) E. coli 10 betas (New England Biolabs) were used as the evolution host; and ii) survival on kanamycin relied on correction of three genetic inactivating components (e.g. survival required reversion of two stop mutations and one active site mutation in kanamycin). The kanamycin resistance gene sequence contains selection mutations for ABE8 evolution. After overnight co-culturing of selection plasmid and editor in 10 beta host cells, the library cultures were plated on 2×YT-agar medium supplemented with plasmid maintenance antibiotic and increasing concentrations of selection antibiotic, kanamycin (64-512 μg/mL). Bacteria were allowed to grow for 1 day and the TadA*8 portion of the surviving clones were Sanger sequenced after enrichment. Identified TadA*8 mutations of interest were then were then incorporated into mammalian expression vector via USER assembly.

### General Mammalian Culture Conditions

[0388] Cells were cultured at 37° C. with 5% CO₂. HEK293T cells [CLBTx013, American Type Cell Culture Collection (ATCC)] were cultured in Dulbecco's modified Eagles medium plus Glutamax (10566-016, Thermo Fisher Scientific) with 10% (v/v) fetal bovine serum (A31606-02, Thermo Fisher Scientific).

Hek293T Plasmid Transfection and gDNA Extraction

[0389] HEK293T cells were seeded onto 48-well well Poly-D-Lysine treated BioCoat plates (Corning) at a density of 35,000 cells/well and transfected 18-24 hours after plating. Cells were counted using a NucleoCounter NC-200 (Chemometec). To these cells were added 750 ng of base editor or nuclease control, 250 ng of sgRNA, and 10 ng of GFP-max plasmid (Lonza) diluted to 12.5 μL total volume in Opti-MEM reduced serum media (ThermoFisher Scientific). The solution was combined with 1.5 μL of Lipofectamine 2000 (ThermoFisher) in 11 μL of Opti-MEM reduced serum media and left to rest at room temperature for 15 min. The entire 25 μL mixture was then transferred to the pre-seeded Hek293T cells and left to incubate for about 120 h. Following incubation, media was aspirated and cells were washed two times with 250 μL of 1×PBS solution (ThermoFisher Scientific) and 100 μL of freshly prepared lysis buffer was added (100 mM Tris-HCl, pH 7.0, 0.05% SDS, 25 μg/mL Proteinase K (Thermo Fisher Scientific). Transfection plates containing lysis buffer were incubated at 37° C. for 1 hour and the mixture was transferred to a 96-well PCR plate and heated at 80° C. for 30 min.

### CD34+ Cell Preparation

[0390] Mobilized peripheral blood was obtained from sickle trait individuals and enriched for Human CD34+ HSPCs (Allcells, MOO1F-GCSF/MOZ-2). The CD34+ cells were thawed and put into X-VIVO 10 (Lonza) containing 1% Glutamax (Gibco), 100 ng/mL of TPO (Peprotech), SCF (Peprotech) and Flt-3 (Peprotech) at 48 hours prior to electroporation.

### Electroporation of CD34+ Cells

[0391] 48 hours post thaw, CD34+ cells were spun down to remove X-VIVO 10 media and washed in MaxCyte buffer (HyClone) with 0.1% HSA (Akron Biotechnologies). The cells were then resuspended in cold MaxCyte buffer at 1,250,000 cells per mL and split into multiple 80 μL aliquots. An mRNA molecule encoding a base editor and a guide polynucleotide were then aliquoted and raised to a total of 20 μL in MaxCyte buffer. The 80 μL of cells was the added into the 20 μL RNA mixture in groups of 2 and loaded into each chamber of an OC100×2 MaxCyte cuvette for electroporation. After receiving the electroporation charge, 100 μL was collected from the chambers and placed in the center of the wells in a 24-well untreated culture plate. The cells recovered for 20 minutes in an incubator (37° C., 5% CO₂). After the 20 minutes recovery, X-VIVO 10 (a hematopoietic cell medium) containing 1% Glutamax, 100 ng/mL of TPO, SCF and Flt-3 was added to the cells for a concentration of 1,000,000 cells per mL. The cells were then left to further recover in an incubator (37° C., 5% CO₂) for 48 hrs.

### Genomic DNA Extraction for CD34+ Cells

[0392] At 48 hours following electroporation, an aliquot of cells was post-cultured in X-VIVO 10 media (Lonza) containing 1% Glutamax (Gibco), 100 ng/mL of TPO (Peprotech), SCF (Peprotech) and Flt-3 (Peprotech). At 48 h and 144 h post-culturing, 100,000 cells were collected and spun down. 50 μL of Quick Extract (Lucigen) was added to the resulting cell pellet and the cell mixture was transferred to a 96-well PCR plate (Bio-Rad). The lysate was heated for 15 minutes at 65° C. followed by 10 minutes at 98° C. The cell lysates were stored at −20° C. for later analysis.

### OTHER EMBODIMENTS

[0393] From the foregoing description, it will be apparent that variations and modifications may be made to the aspects or embodiments described herein to adopt it to various usages and conditions. Such embodiments are also within the scope of the following claims.

[0394] The recitation of a listing of elements in any definition of a variable herein includes definitions of that variable as any single element or combination (or subcombination) of listed elements. The recitation of an embodiment herein includes that embodiment as any single embodiment or in combination with any other embodiments or portions thereof.

[0395] All patents and publications mentioned in this specification are herein incorporated by reference to the same extent as if each independent patent and publication was specifically and individually indicated to be incorporated by reference. The invention of the disclosure may be related to PCT/US2020/018193, filed Feb. 13, 2020, or to PCT/US19/31897, filed May 11, 2019, the disclosures of which are incorporated herein by reference in their entireties for all purposes

What is claimed:

1. A method for treating a hemoglobinopathy in a subject in need thereof, the method comprising:
a) contacting an isolated hematopoietic stem cell or progenitor thereof with two or more guide polynucleotides, or one or more polynucleotides encoding the guide polynucleotides, and a base editor comprising a nucleic acid programmable DNA binding protein (napDNAbp) and an adenosine deaminase, or one or more polynucleotides encoding the base editor, wherein the adenosine deaminase comprises a combination of alterations relative to the following sequence of TadA*7.10 and has at least 85% sequence identity to the following sequence of TadA*7.10: MSEVEFSHEYWMRHALTLAKRARDEREVPVGAVLVLNNRVIGEGWNRAIGLHDPTAHAEIMA LRQGGLVMQNYRLIDATLYVTFEPCVMCAGAMIHSRIGRVVFGVRNAKTGAAGSLMDVLHYP GMNHRVEITEGILADECAALLCYFFRMPRQVFNAQKKAQSSTD (SEQ ID NO: 1), wherein the combination of alterations comprises:
i) F149Y and V82T; or
ii) F149Y, T166I, and/or D167N, and the alteration V82T; and
wherein the two or more guide polynucleotides target the base editor to effect an alteration to a beta globin polynucleotide (HBB) that results in expression of a beta globin polypeptide having an alanine at position 6 (Hb G-Makassar), and wherein the two or more guide polynucleotides target the base editor to effect an alteration in a cluster of differentiation (CD117) polynucleotide that results in expression of a CD117 polypeptide with reduced binding to an antibody that selectively binds a wild type CD117 polypeptide, thereby generating an edited cell; and
(b) wherein the cell is in the subject or the method further comprises administering the edited cell to the subject.

2. The method of claim 1, wherein the combination of alterations comprises or further comprises:
I76Y, V82T, Y123H, Y147R, F149Y;
Q154R or F149Y, T166I, and D167N;
I76Y, Y123H, Y147D, and Q154R; and/or
I76Y, V82T, Y123H, Y147D, F149Y, Q154R, T166I, and D167N

3. The method of claim 1, wherein the adenosine deaminase comprises the following amino acid sequence: SEVEFSHEYWMRHALTLAKRARDEREVPVGAVLVLNNRVIGEGWNRAIGLHDPTAHAEIMAL RQGGLVMQNYRLYDATLYTTFEPCVMCAGAMIHSRIGRVVFGVRNAKTGAAGSLMDVLHHPG MNHRVEITEGILADECAALLCDFYRMPRRVFNAQKKAQSSIN (SEQ ID NO: 519); and
wherein the two or more guide polynucleotides comprise a spacer nucleotide sequence selected from the group consisting of: UUCUCCACAGGAGUCAGGUG (SEQ ID NO: 445); ACUUCUCCACAGGAGUCAGG (SEQ ID NO: 446); GACUUCUCCACAGGAGUCAGG (SEQ ID NO: 447); CUUCUCCACAGGAGUCAGG (SEQ ID NO: 448); CUUCUCCACAGGAGUCAGAU (SEQ ID NO: 449); ACUUCUCCACAGGAGUCAGAU (SEQ ID NO: 450); GACUUCUCCACAGGAGUCAGAU (SEQ ID NO: 451); UCUGACUCCUGUGGAGAAGUCU (SEQ ID NO: 452); AGACUUCUCCACAGGAGUCAGA (SEQ ID NO: 453); and UCCACAGGAGUCAGAUGCAC (SEQ ID NO: 454); or a spacer sequence selected from those listed in Table 2; and, optionally, a scaffold with the following nucleotide sequence:
(SEQ ID NO: 317)
GUUUUAGAGCUAGAAAUAGCAAGUUAAAAUAAGGCUAGUCCGUUAUCAA
CUUGAAAAAGUGGCACCGAGUCGGUGCUUUU.

4. The method of 1, wherein the two or more guide polynucleotides comprise a spacer nucleotide sequence selected from the group consisting of:
(SEQ ID NO 660; CC128)
AAAUAUAAUAGCUGGCAUCA;
(SEQ ID NO: 722; CC200)
AUAAUAGCUGGCAUCACGGU;
(SEQ ID NO: 723; gRNA889)
CCACUAGCUUUCCAAACGGU;
(SEQ ID NO: 724; gRNA908)
GCUGAACUGAUAGUCAACGU;
(SEQ ID NO: 725; gRNA918)
UUUGACAAAGCCCGGAUCAG;
(SEQ ID NO: 726; gRNA923)
UGAAAGUGAGGCCAGGUACU;
(SEQ ID NO: 727; gRNA928)
AAACAGUCAGGUGAGUGAAU;
(SEQ ID NO: 728; gRNA929)
AACUACAGGAGAAAUAUAAU;
and
(SEQ ID NO: 729; gRNA944)
GAUUAAAAGGCACCGAAGGA.

5. The method of claim 1, wherein the two or more guide polynucleotides comprise a scaffold with a sequence selected from the group consisting of: GUUUUAGAGCUAGAAAUAGCAAGUUAAAAUAAGGCUAGUCCGUUAUCAACUUGAAAAAGUGG CACCGAGUCGGUGCmUsmUsmUsU (SEQ ID NO: 521); GUUUUAGAmGmCmCmGmGmCmGmGmAmAmAmCmGmCmCmGmGmCAAGUUAAAAUAAGGCUAG UCCGUUAmUmCAAmCmUmUGGACUUCGGUCCmAmAmGUGGmCmAmCmCmGmAmGmUmCmGmG mUmGmCmUsmUsmUsmU (SEQ ID NO: 522); mNsmNsmNsNNNNNNNNNNNNNNNNNGUUUUAGAGCUAGAAAUAGCAAGUUAAAAUAAGGCU AGUCCGUUAUCAACUUGAAAAAGUGGCACCGAGUCGGUGCmUsmUsmUsU (SEQ ID NO: 443); and mNsmNsmNsNNNNNNNNNNNNNNNNNGUUUUAGAmGmCmCmGmGmCmGmGmAmAmAmCmGmC mCmGmGmCAAGUUAAAAUAAGGCUAGUCCGUUAmUmCAAmCmUmUGGACUUCGGUCCmAmAm GUGGmCmAmCmCmGmAmGmUmCmGmGmUmGmCmUsmUsmUsmU (SEQ ID NO: 444), wherein “N” represents any nucleotide, “mN” indicates a 2′-OMe modification of the nucleotide “N”, and “Ns” indicates that the nucleotide “N” is linked to the following nucleotide by a phosphorothioate (PS).

6. A cell produced by the method of claim 1.

7. A pharmaceutical composition comprising an effective amount of the cell of claim 6.

8. An adenosine deaminase polypeptide comprising a combination of alterations relative to the following sequence of TadA*7.10: MSEVEFSHEYWMRHALTLAKRARDEREVPVGAVLVLNNRVIGEGWNRAIGLHDPTAHAEIMA LRQGGLVMQNYRLIDATLYVTFEPCVMCAGAMIHSRIGRVVFGVRNAKTGAAGSLMDVLHYP GMNHRVEITEGILADECAALLCYFFRMPRQVFNAQKKAQSSTD (SEQ ID NO: 1), wherein the combination of alterations comprises F149Y and V82T, and wherein the adenosine deaminase has at least 85% sequence identity to TadA*7.10.

9. The adenosine deaminase polypeptide of claim 8, wherein the combination of alterations further comprises an alteration selected from the group consisting of 176Y, Y123H, Y147R, and Q154R.

10. An adenosine deaminase polypeptide comprising the following amino acid sequence: SEVEFSHEYWMRHALTLAKRARDEREVPVGAVLVLNNRVIGEGWNRAIGLHDPTAHAEIMAL RQGGLVMQNYRLYDATLYTTFEPCVMCAGAMIHSRIGRVVFGVRNAKTGAAGSLMDVLHHPG MNHRVEITEGILADECAALLCRFYRMPRRVFNAQKKAQSSTD (SEQ ID NO: 518); or
comprising a combination of alterations to the following sequence of TadA*7.10: MSEVEFSHEYWMRHALTLAKRARDEREVPVGAVLVLNNRVIGEGWNRAIGLHDPTAHAEIMA LRQGGLVMQNYRLIDATLYVTFEPCVMCAGAMIHSRIGRVVFGVRNAKTGAAGSLMDVLHYP GMNHRVEITEGILADECAALLCYFFRMPRQVFNAQKKAQSSTD (SEQ ID NO: 1), wherein the combination of alterations comprises F149Y, T166I, and/or D167N, and the alteration V82T, and wherein the adenosine deaminase has at least 85% sequence identity to TadA*7.10.

11. The adenosine deaminase polypeptide of claim 10, wherein the combination of alterations further comprises the following additional alterations: I76Y, Y123H, Y147D, and Q154R.

12. A base editor comprising a nucleic acid programmable DNA binding protein (napDNAbp) and the adenosine deaminase of claim 10.

13. A base editor comprising: a nucleic acid programmable DNA binding protein (napDNAbp) and an adenosine deaminase, wherein the adenosine deaminase comprises a combination of alterations relative to TadA*7.10:
(SEQ ID NO: 1)
MSEVEFSHEYWMRHALTLAKRARDEREVPVGAVLVLNNRVIGEGWNRAI
GLHDPTAHAEIMALRQGGLVMQNYRLIDATLYVTFEPCVMCAGAMIHSR
IGRVVFGVRNAKTGAAGSLMDVLHYPGMNHRVEITEGILADECAALLCY
FFRMPRQVFNAQKKAQSSTD,
wherein the combination of alterations comprises I76Y, V82T, Y123H, Y147R, F149Y, and Q154R, and wherein the adenosine deaminase has at least 85% sequence identity to TadA*7.10; or
the adenosine deaminase comprises a combination of alterations relative to TadA*7.10:
(SEQ ID NO: 1)
MSEVEFSHEYWMRHALTLAKRARDEREVPVGAVLVLNNRVIGEGWNRAI
GLHDPTAHAEIMALRQGGLVMQNYRLIDATLYVTFEPCVMCAGAMIHSR
IGRVVFGVRNAKTGAAGSLMDVLHYPGMNHRVEITEGILADECAALLCY
FFRMPRQVFNAQKKAQSSTD,
wherein the combination of alterations comprises I76Y, V82T, Y123H, Y147D, F149Y, Q154R, T166I, and D167N, and wherein the adenosine deaminase has at least 85% sequence identity to TadA*7.10.

14. A polynucleotide encoding the adenosine deaminase polypeptide of claim 10.

15. A method of altering a nucleobase of a polynucleotide, the method comprising contacting the polynucleotide with the base editor of claim 10, thereby altering a nucleobase of the polynucleotide.

16. A base editor system comprising the base editor of claim 13, or one or more polynucleotides encoding the base editor, and a guide polynucleotide, or a polynucleotide encoding the guide polynucleotide, that targets the base editor to effect an alteration to a polynucleotide associated with a genetic disorder.

17. A base editor system comprising the base editor of claim 13, or a polynucleotide encoding the base editor, and two or more guide polynucleotides, or one or more polynucleotides encoding the two or more guide polynucleotides, wherein one of the guide polynucleotides targets the base editor to effect an alteration to a beta globin polynucleotide (HBB) that results in expression of a beta globin polypeptide having an alanine at position 6 (Hb G-Makassar), and another of the guide polynucleotides targets the base editor to effect an alteration in a cluster of differentiation (CD117) polynucleotide that results in expression of a CD117 polypeptide with reduced binding to an antibody that selectively binds a wild type CD117 polypeptide.

18. The base editor system of claim 17, wherein:
a) one of the guide polynucleotides comprises a spacer sequence selected from the group consisting of:
(SEQ ID NO: 445)
UUCUCCACAGGAGUCAGGUG;
(SEQ ID NO: 446)
ACUUCUCCACAGGAGUCAGG;
(SEQ ID NO: 447)
GACUUCUCCACAGGAGUCAGG;
(SEQ ID NO: 448)
CUUCUCCACAGGAGUCAGG;
(SEQ ID NO: 449)
CUUCUCCACAGGAGUCAGAU;
(SEQ ID NO: 450)
ACUUCUCCACAGGAGUCAGAU;
(SEQ ID NO: 451)
GACUUCUCCACAGGAGUCAGAU;
(SEQ ID NO: 452)
UCUGACUCCUGUGGAGAAGUCU;
(SEQ ID NO: 453)
AGACUUCUCCACAGGAGUCAGA;
and
(SEQ ID NO: 454)
UCCACAGGAGUCAGAUGCAC;
b) another of guide polynucleotides comprises a spacer sequence selected from the group consisting of:
(SEQ ID NO 660; CC128)
AAAUAUAAUAGCUGGCAUCA;
(SEQ ID NO: 722; CC200)
AUAAUAGCUGGCAUCACGGU;
(SEQ ID NO: 723; gRNA889)
CCACUAGCUUUCCAAACGGU;
(SEQ ID NO: 724; gRNA908)
GCUGAACUGAUAGUCAACGU;
(SEQ ID NO: 725; gRNA918)
UUUGACAAAGCCCGGAUCAG;
(SEQ ID NO: 726; gRNA923)
UGAAAGUGAGGCCAGGUACU;
(SEQ ID NO: 727; gRNA928)
AAACAGUCAGGUGAGUGAAU;
(SEQ ID NO: 728; gRNA929)
AACUACAGGAGAAAUAUAAU;
and
(SEQ ID NO: 729; gRNA944)
GAUUAAAAGGCACCGAAGGA.

19. A kit suitable for use in the method of any one of the above claims, wherein the kit comprises the base editor of claim 13, or a polynucleotide encoding the base editor.

20. The base editor of claim 13, wherein the base editor comprises the following amino acid sequence:
(SEQ ID NO: 524)
MSEVEFSHEYWMRHALTLAKRARDEREVPVGAVLVLNNRVIGEGWNRAIGLHDPTAHAEIMA
LRQGGLVMQNYRLYDATLYTTFEPCVMCAGAMIHSRIGRVVFGVRNAKTGAAGSLMDVLHHP
GMNHRVEITEGILADECAALLCRFYRMPRRVFNAQKKAQSSTDSGGSSGGSSGSETPGTSES
ATPESSGGSSGGSDKKYSIGLAIGTNSVGWAVITDEYKVPSKKFKVLGNTDRHSIKKNLIGA
LLFDSGETAEATRLKRTARRRYTRRKNRICYLQEIFSNEMAKVDDSFFHRLEESFLVEEDKK
HERHPIFGNIVDEVAYHEKYPTIYHLRKKLVDSTDKADLRLIYLALAHMIKFRGHFLIEGDL
NPDNSDVDKLFIQLVQTYNQLFEENPINASGVDAKAILSARLSKSRRLENLIAQLPGEKKNG
LFGNLIALSLGLTPNFKSNFDLAEDAKLQLSKDTYDDDLDNLLAQIGDQYADLFLAAKNLSD
AILLSDILRVNTEITKAPLSASMVKRYDEHHQDLTLLKALVRQQLPEKYKEIFFDQSKNGYA
GYIDGGASQEEFYKFIKPILEKMDGTEELLVKLNREDLLRKQRTFDNGIIPHQIHLGELHAI
LRRQGDFYPFLKDNREKIEKILTFRIPYYVGPLARGNSRFAWMTRKSEETITPWNFEEVVDK
GASAQSFIERMTNFDKNLPNEKVLPKHSLLYEYFTVYNELTKVKYVTEGMRKPAFLSGEQKK
AIVDLLFKTNRKVTVKQLKEDYFKKIECFDSVEISGVEDRFNASLGTYHDLLKIIKDKDFLD
NEENEDILEDIVLTLTLFEDREMIEERLKTYAHLFDDKVMKQLKRLRYTGWGRLSRKLINGI
RDKQSGKTILDFLKSDGFANRNFMQLIHDDSLTFKEDIQKAQVSGQGDSLHEHIANLAGSPA
IKKGILQTVKVVDELVKVMGGHKPENIVIEMARENQTTQKGQKNSRERMKRIEEGIKELGSQ
ILKEHPVENTQLQNEKLYLYYLQNGRDMYVDQELDINRLSDYDVDHIVPQSFLKDDSIDNKV
LTRSDKNRGKSDNVPSEEVVKKMKNYWRQLLNAKLITQRKFDNLTKAERGGLSELDKAGFIK
RQLVETRQITKHVAQILDSRMNTKYDENDKLIREVKVITLKSKLVSDFRKDFQFYKVREINN
YHHAHDAYLNAVVGTALIKKYPKLESEFVYGDYKVYDVRKMIAKSEQEIGKATAKYFFYSNI
MNFFKTEITLANGEIRKRPLIETNGETGEIVWDKGRDFATVRKVLSMPQVNIVKKTEVQTGG
FSKESILPKGNSDKLIARKKDWDPKKYGGFNSPTVAYSVLVVAKVEKGKSKKLKSVKELLGI
TIMERSSFEKNPIDFLEAKGYKEVKKDLIIKLPKYSLFELENGRKRMLASAGVLQKGNELAL
PSKYVNFLYLASHYEKLKGSPEDNEQKQLFVEQHKHYLDEIIEQISEFSKRVILADANLDKV
LSAYNKHRDKPIREQAENIIHLFTLTNLGAPAAFKYFDTTINRKQYNTTKEVLDATLIRQSI
TGLYETRIDLSQLGGDEGADKRTADGSEFESPKKKRKV;
wherein the base editor comprises the following amino acid sequence:
(SEQ ID NO: 525)
MSEVEFSHEYWMRHALTLAKRARDEREVPVGAVLVLNNRVIGEGWNRAIGLHDPTAHAEIMA
LRQGGLVMQNYRLYDATLYTTFEPCVMCAGAMIHSRIGRVVFGVRNAKTGAAGSLMDVLHHP
GMNHRVEITEGILADECAALLCDFYRMPRRVFNAQKKAQSSINSGGSSGGSSGSETPGTSES
ATPESSGGSSGGSDKKYSIGLAIGTNSVGWAVITDEYKVPSKKFKVLGNTDRHSIKKNLIGA
LLFDSGETAEATRLKRTARRRYTRRKNRICYLQEIFSNEMAKVDDSFFHRLEESFLVEEDKK
HERHPIFGNIVDEVAYHEKYPTIYHLRKKLVDSTDKADLRLIYLALAHMIKFRGHFLIEGDL
NPDNSDVDKLFIQLVQTYNQLFEENPINASGVDAKAILSARLSKSRRLENLIAQLPGEKKNG
LFGNLIALSLGLTPNFKSNFDLAEDAKLQLSKDTYDDDLDNLLAQIGDQYADLFLAAKNLSD
AILLSDILRVNTEITKAPLSASMVKRYDEHHQDLTLLKALVRQQLPEKYKEIFFDQSKNGYA
GYIDGGASQEEFYKFIKPILEKMDGTEELLVKLNREDLLRKQRTFDNGIIPHQIHLGELHAI
LRRQGDFYPFLKDNREKIEKILTFRIPYYVGPLARGNSRFAWMTRKSEETITPWNFEEVVDK
GASAQSFIERMTNFDKNLPNEKVLPKHSLLYEYFTVYNELTKVKYVTEGMRKPAFLSGEQKK
AIVDLLFKTNRKVTVKQLKEDYFKKIECFDSVEISGVEDRFNASLGTYHDLLKIIKDKDFLD
NEENEDILEDIVLTLTLFEDREMIEERLKTYAHLFDDKVMKQLKRLRYTGWGRLSRKLINGI
RDKQSGKTILDFLKSDGFANRNFMQLIHDDSLTFKEDIQKAQVSGQGDSLHEHIANLAGSPA
IKKGILQTVKVVDELVKVMGGHKPENIVIEMARENQTTQKGQKNSRERMKRIEEGIKELGSQ
ILKEHPVENTQLQNEKLYLYYLQNGRDMYVDQELDINRLSDYDVDHIVPQSFLKDDSIDNKV
LTRSDKNRGKSDNVPSEEVVKKMKNYWRQLLNAKLITQRKFDNLTKAERGGLSELDKAGFIK
RQLVETRQITKHVAQILDSRMNTKYDENDKLIREVKVITLKSKLVSDFRKDFQFYKVREINN
YHHAHDAYLNAVVGTALIKKYPKLESEFVYGDYKVYDVRKMIAKSEQEIGKATAKYFFYSNI
MNFFKTEITLANGEIRKRPLIETNGETGEIVWDKGRDFATVRKVLSMPQVNIVKKTEVQTGG
FSKESILPKGNSDKLIARKKDWDPKKYGGFNSPTVAYSVLVVAKVEKGKSKKLKSVKELLGI
TIMERSSFEKNPIDFLEAKGYKEVKKDLIIKLPKYSLFELENGRKRMLASAGVLQKGNELAL
PSKYVNFLYLASHYEKLKGSPEDNEQKQLFVEQHKHYLDEIIEQISEFSKRVILADANLDKV
LSAYNKHRDKPIREQAENIIHLFTLTNLGAPAAFKYFDTTINRKQYNTTKEVLDATLIRQSI
TGLYETRIDLSQLGGDEGADKRTADGSEFESPKKKRKV.

The application's sequence listing, which the Patent Office published only in electronic form, follows.

SEQUENCE LISTING (930 sequences)

SEQ ID NO: 1 - protein, 167 aa, Escherichia coli
  REGION 1..167: note = misc_feature - TadA*7.10 (ecTadA) polypeptide sequence
MSEVEFSHEYWMRHALTLAKRARDEREVPVGAVLVLNNRVIGEGWNRAIGLHDPTAHAEIMALRQGGLVMQNYRLIDATLYVTFEPCVMCAGAMIHSRIGRVVFGVRNAKTGAAGSLMDVLHYPGMNHRVEITEGILADECAALLCYFFRMPRQVFNAQKKAQSSTD

SEQ ID NO: 2 - DNA, 4092 bp, synthetic construct
  misc_feature 1..4092: note = BhCas12b GGSGGS-ABE8-Xten20at P153 polynucleotide sequence
  misc_feature 1..6: note = Kozak sequence
  misc_feature 7..57: note = Sequence encoding N-terminal nuclear localization signal
  misc_feature 58..513: note = Sequence encoding BhCas12b
  misc_feature 514..531: note = Sequence encoding a linker
  misc_feature 532..1029: note = Sequence encoding TadA*8
  misc_feature 1030..1089: note = Sequence encoding Xten20 linker
  misc_feature 1090..3954: note = Sequence encoding BhCas12b
  misc_feature 3955..4002: note = Sequence encoding C-terminal NLS
  misc_feature 4003..4008: note = Sequence encoding GS linker
  misc_feature 4009..4089: note = Sequence encoding 3x hemagglutinin (HA) tag
  source 1..4092: mol_type = other DNA
gccaccatggccccaaagaagaagcggaaggtcggtatccacggagtcccagcagccgccaccagatccttcatcctgaagatcgagcccaacgaggaagtgaagaaaggcctctggaaaacccacgaggtgctgaaccacggaatcgcctactacatgaatatcctgaagctgatccggcaagaggccatctacgagcaccacgagcaggaccccaagaatcccaagaaggtgtccaaggccgagatccaggccgagctgtgggatttcgtgctgaagatgcagaagtgcaacagcttcacacacgaggtggacaaggacgaggtgttcaacatcctgagagagctgtacgaggaactggtgcccagcagcgtggaaaagaagggcgaagccaaccagctgagcaacaagtttctgtaccctctggtggaccccaacagccagtctggaaagggaacagccagcagcggcagaaagcccagatggtacaacctgaagattgccggcgatcccggaggctctggaggaagctccgaagtcgagttttcccatgagtactggatgagacacgcattgactctcgcaaagagggctcgagatgaacgcgaggtgcccgtgggggcagtactcgtgctcaacaatcgcgtaatcggcgaaggttggaatagggcaatcggactccacgaccccactgcacatgcggaaatcatggcccttcgacagggagggcttgtgatgcagaattatcgactttatgatgcgacgctgtacgtcacgtttgaaccttgcgtaatgtgcgcgggagctatgattcactcccgcattggacgagttgtattcggtgttcgcaacgccaagacgggtgccgcaggttcactgatggacgtgctgcatcatccaggcatgaaccaccgggtagaaatcacagaaggcatattggcggacgaatgtgcggcgctgttgtgtcgtttttttcgcatgcccaggcgggtctttaacgcccagaaaaaagcacaatcctctactgacggctcttctggatctgaaacacctggcacaagcgagagcgccacccctgagagctctggctcctgggaagaagagaagaagaagtgggaagaagataagaaaaaggacccgctggccaagatcctgggcaagctggctgagtacggactgatccctctgttcatcccctacaccgacagcaacgagcccatcgtgaaagaaatcaagtggatggaaaagtcccggaaccagagcgtgcggcggctggataaggacatgttcattcaggccctggaacggttcctgagctgggagagctggaacctgaaagtgaaagaggaatacgagaaggtcgagaaagagtacaagaccctggaagagaggatcaaagaggacatccaggctctgaaggctctggaacagtatgagaaagagcggcaagaacagctgctgcgggacaccctgaacaccaacgagtaccggctgagcaagagaggccttagaggctggcgggaaatcatccagaaatggctgaaaatggacgagaacgagccctccgagaagtacctggaagtgttcaaggactaccagcggaagcaccctagagaggccggcgattacagcgtgtacgagttcctgtccaagaaagagaaccacttcatctggcggaatcaccctgagtacccctacctgtacgccaccttctgcgagatcgacaagaaaaagaaggacgccaagcagcaggccaccttcacactggccgatcctatcaatcaccctctgtgggtccgattcgaggaaagaagcggcagcaacctgaacaagtacagaatcctgaccgagcagctgcacaccgagaagctgaagaaaaagctgacagtgcagctggaccggctgatctaccctacagaatctggcggctgggaagagaagggcaaagtggacattgtgctgctgcccagccggcagttctacaaccagatcttcctggacatcgaggaaaagggcaagcacgccttcacctacaaggatgagagcatcaagttccctctgaagggcacactcggcggagccagagtgcagttcgacagagatcacctgagaagataccctcacaaggtggaaagcggcaacgtgggcagaatctacttcaacatgaccgtgaacatcgagcctacagagtccccagtgtccaagtctctgaagatccaccgggacgacttccccaaggtggtcaacttcaagcccaaagaactgaccgagtggatcaaggacagcaagggcaagaaactgaagtccggcatcgagtccctggaaatcggcctgagagtgatgagcatcgacctgggacagagacaggccgctgccgcctctattttcgaggtggtggatcagaagcccgacatcgaaggcaagctgtttttcccaatcaagggcaccgagctgtatgccgtgcacagagccagcttcaacatcaagctgcccggcgagacactggtcaagagcagagaagtgctgcggaaggccagagaggacaatctgaaactgatgaaccagaagctcaacttcctgcggaacgtgctgcacttccagcagttcgaggacatcaccgagagagagaagcgggtcaccaagtggatcagcagacaagagaacagcgacgtgcccctggtgtaccaggatgagctgatccagatccgcgagctgatgtacaagccttacaaggactgggtcgccttcctgaagcagctccacaagagactggaagtcgagatcggcaaagaagtgaagcactggcggaagtccctgagcgacggaagaaagggcctgtacggcatctccctgaagaacatcgacgagatcgatcggacccggaagttcctgctgagatggtccctgaggcctaccgaacctggcgaagtgcgtagactggaacccggccagagattcgccatcgaccagctgaatcacctgaacgccctgaaagaagatcggctgaagaagatggccaacaccatcatcatgcacgccctgggctactgctacgacgtgcggaagaagaaatggcaggctaagaaccccgcctgccagatcatcctgttcgaggatctgagcaactacaacccctacgaggaaaggtcccgcttcgagaacagcaagctcatgaagtggtccagacgcgagatccccagacaggttgcactgcagggcgagatctatggcctgcaagtgggagaagtgggcgctcagttcagcagcagattccacgccaagacaggcagccctggcatcagatgtagcgtcgtgaccaaagagaagctgcaggacaatcggttcttcaagaatctgcagagagagggcagactgaccctggacaaaatcgccgtgctgaaagagggcgatctgtacccagacaaaggcggcgagaagttcatcagcctgagcaaggatcggaagtgcgtgaccacacacgccgacatcaacgccgctcagaacctgcagaagcggttctggacaagaacccacggcttctacaaggtgtactgcaaggcctaccaggtggacggccagaccgtgtacatccctgagagcaaggaccagaagcagaagatcatcgaagagttcggcgagggctacttcattctgaaggacggggtgtacgaatgggtcaacgccggcaagctgaaaatcaagaagggcagctccaagcagagcagcagcgagctggtggatagcgacatcctgaaagacagcttcgacctggcctccgagctgaaaggcgaaaagctgatgctgtacagggaccccagcggcaatgtgttccccagcgacaaatggatggccgctggcgtgttcttcggaaagctggaacgcatcctgatcagcaagctgaccaaccagtactccatcagcaccatcgaggacgacagcagcaagcagtctatgaaaaggccggcggccacgaaaaaggccggccaggcaaaaaagaaaaagggatcctacccatacgatgttccagattacgcttatccctacgacgtgcctgattatgcatacccatatgatgtccccgactatgcctaa

SEQ ID NO: 3 - protein, 1361 aa, synthetic construct
  REGION 1..1361: note = BhCas12b GGSGGS-ABE8-Xten20at P153 polypeptide sequence
MAPKKKRKVGIHGVPAAATRSFILKIEPNEEVKKGLWKTHEVLNHGIAYYMNILKLIRQEAIYEHHEQDPKNPKKVSKAEIQAELWDFVLKMQKCNSFTHEVDKDEVFNILRELYEELVPSSVEKKGEANQLSNKFLYPLVDPNSQSGKGTASSGRKPRWYNLKIAGDPGGSGGSSEVEFSHEYWMRHALTLAKRARDEREVPVGAVLVLNNRVIGEGWNRAIGLHDPTAHAEIMALRQGGLVMQNYRLYDATLYVTFEPCVMCAGAMIHSRIGRVVFGVRNAKTGAAGSLMDVLHHPGMNHRVEITEGILADECAALLCRFFRMPRRVFNAQKKAQSSTDGSSGSETPGTSESATPESSGSWEEEKKKWEEDKKKDPLAKILGKLAEYGLIPLFIPYTDSNEPIVKEIKWMEKSRNQSVRRLDKDMFIQALERFLSWESWNLKVKEEYEKVEKEYKTLEERIKEDIQALKALEQYEKERQEQLLRDTLNTNEYRLSKRGLRGWREIIQKWLKMDENEPSEKYLEVFKDYQRKHPREAGDYSVYEFLSKKENHFIWRNHPEYPYLYATFCEIDKKKKDAKQQATFTLADPINHPLWVRFEERSGSNLNKYRILTEQLHTEKLKKKLTVQLDRLIYPTESGGWEEKGKVDIVLLPSRQFYNQIFLDIEEKGKHAFTYKDESIKFPLKGTLGGARVQFDRDHLRRYPHKVESGNVGRIYFNMTVNIEPTESPVSKSLKIHRDDFPKVVNFKPKELTEWIKDSKGKKLKSGIESLEIGLRVMSIDLGQRQAAAASIFEVVDQKPDIEGKLFFPIKGTELYAVHRASFNIKLPGETLVKSREVLRKAREDNLKLMNQKLNFLRNVLHFQQFEDITEREKRVTKWISRQENSDVPLVYQDELIQIRELMYKPYKDWVAFLKQLHKRLEVEIGKEVKHWRKSLSDGRKGLYGISLKNIDEIDRTRKFLLRWSLRPTEPGEVRRLEPGQRFAIDQLNHLNALKEDRLKKMANTIIMHALGYCYDVRKKKWQAKNPACQIILFEDLSNYNPYEERSRFENSKLMKWSRREIPRQVALQGEIYGLQVGEVGAQFSSRFHAKTGSPGIRCSVVTKEKLQDNRFFKNLQREGRLTLDKIAVLKEGDLYPDKGGEKFISLSKDRKCVTTHADINAAQNLQKRFWTRTHGFYKVYCKAYQVDGQTVYIPESKDQKQKIIEEFGEGYFILKDGVYEWVNAGKLKIKKGSSKQSSSELVDSDILKDSFDLASELKGEKLMLYRDPSGNVFPSDKWMAAGVFFGKLERILISKLTNQYSISTIEDDSSKQSMKRPAATKKAGQAKKKKGSYPYDVPDYAYPYDVPDYAYPYDVPDYA

SEQ ID NO: 4 - DNA, 4092 bp, synthetic construct
  misc_feature 1..4092: note = BhCas12b GGSGGS-ABE8-Xten20at K255 polynucleotide sequence
  misc_feature 1..6: note = Kozak sequence
  misc_feature 7..57: note = Sequence encoding N-terminal nuclear localization signal (NLS)
  misc_feature 58..822: note = Sequence encoding BhCas12b
  misc_feature 823..840: note = Sequence encoding a linker
  misc_feature 841..1338: note = Sequence encoding TadA*8
  misc_feature 1339..1398: note = Sequence encoding Xten20 linker
  misc_feature 1399..3954: note = Sequence encoding BhCas12b
  misc_feature 3955..4002: note = Sequence encoding C-terminal NLS
  misc_feature 4003..4008: note = Sequence encoding a GS linker
  misc_feature 4009..4089: note = Sequence encoding 3x hemagglutinin (HA) tag
  source 1..4092: mol_type = other DNA
gccaccatggccccaaagaagaagcggaaggtcggtatccacggagtcccagcagccgccaccagatccttcatcctgaagatcgagcccaacgaggaagtgaagaaaggcctctggaaaacccacgaggtgctgaaccacggaatcgcctactacatgaatatcctgaagctgatccggcaagaggccatctacgagcaccacgagcaggaccccaagaatcccaagaaggtgtccaaggccgagatccaggccgagctgtgggatttcgtgctgaagatgcagaagtgcaacagcttcacacacgaggtggacaaggacgaggtgttcaacatcctgagagagctgtacgaggaactggtgcccagcagcgtggaaaagaagggcgaagccaaccagctgagcaacaagtttctgtaccctctggtggaccccaacagccagtctggaaagggaacagccagcagcggcagaaagcccagatggtacaacctgaagattgccggcgatccctcctgggaagaagagaagaagaagtgggaagaagataagaaaaaggacccgctggccaagatcctgggcaagctggctgagtacggactgatccctctgttcatcccctacaccgacagcaacgagcccatcgtgaaagaaatcaagtggatggaaaagtcccggaaccagagcgtgcggcggctggataaggacatgttcattcaggccctggaacggttcctgagctgggagagctggaacctgaaagtgaaagaggaatacgagaaggtcgagaaagagtacaagaccctggaagagaggatcaaaggaggctctggaggaagctccgaagtcgagttttcccatgagtactggatgagacacgcattgactctcgcaaagagggctcgagatgaacgcgaggtgcccgtgggggcagtactcgtgctcaacaatcgcgtaatcggcgaaggttggaatagggcaatcggactccacgaccccactgcacatgcggaaatcatggcccttcgacagggagggcttgtgatgcagaattatcgactttatgatgcgacgctgtacgtcacgtttgaaccttgcgtaatgtgcgcgggagctatgattcactcccgcattggacgagttgtattcggtgttcgcaacgccaagacgggtgccgcaggttcactgatggacgtgctgcatcatccaggcatgaaccaccgggtagaaatcacagaaggcatattggcggacgaatgtgcggcgctgttgtgtcgtttttttcgcatgcccaggcgggtctttaacgcccagaaaaaagcacaatcctctactgacggctcttctggatctgaaacacctggcacaagcgagagcgccacccctgagagctctggcgaggacatccaggctctgaaggctctggaacagtatgagaaagagcggcaagaacagctgctgcgggacaccctgaacaccaacgagtaccggctgagcaagagaggccttagaggctggcgggaaatcatccagaaatggctgaaaatggacgagaacgagccctccgagaagtacctggaagtgttcaaggactaccagcggaagcaccctagagaggccggcgattacagcgtgtacgagttcctgtccaagaaagagaaccacttcatctggcggaatcaccctgagtacccctacctgtacgccaccttctgcgagatcgacaagaaaaagaaggacgccaagcagcaggccaccttcacactggccgatcctatcaatcaccctctgtgggtccgattcgaggaaagaagcggcagcaacctgaacaagtacagaatcctgaccgagcagctgcacaccgagaagctgaagaaaaagctgacagtgcagctggaccggctgatctaccctacagaatctggcggctgggaagagaagggcaaagtggacattgtgctgctgcccagccggcagttctacaaccagatcttcctggacatcgaggaaaagggcaagcacgccttcacctacaaggatgagagcatcaagttccctctgaagggcacactcggcggagccagagtgcagttcgacagagatcacctgagaagataccctcacaaggtggaaagcggcaacgtgggcagaatctacttcaacatgaccgtgaacatcgagcctacagagtccccagtgtccaagtctctgaagatccaccgggacgacttccccaaggtggtcaacttcaagcccaaagaactgaccgagtggatcaaggacagcaagggcaagaaactgaagtccggcatcgagtccctggaaatcggcctgagagtgatgagcatcgacctgggacagagacaggccgctgccgcctctattttcgaggtggtggatcagaagcccgacatcgaaggcaagctgtttttcccaatcaagggcaccgagctgtatgccgtgcacagagccagcttcaacatcaagctgcccggcgagacactggtcaagagcagagaagtgctgcggaaggccagagaggacaatctgaaactgatgaaccagaagctcaacttcctgcggaacgtgctgcacttccagcagttcgaggacatcaccgagagagagaagcgggtcaccaagtggatcagcagacaagagaacagcgacgtgcccctggtgtaccaggatgagctgatccagatccgcgagctgatgtacaagccttacaaggactgggtcgccttcctgaagcagctccacaagagactggaagtcgagatcggcaaagaagtgaagcactggcggaagtccctgagcgacggaagaaagggcctgtacggcatctccctgaagaacatcgacgagatcgatcggacccggaagttcctgctgagatggtccctgaggcctaccgaacctggcgaagtgcgtagactggaacccggccagagattcgccatcgaccagctgaatcacctgaacgccctgaaagaagatcggctgaagaagatggccaacaccatcatcatgcacgccctgggctactgctacgacgtgcggaagaagaaatggcaggctaagaaccccgcctgccagatcatcctgttcgaggatctgagcaactacaacccctacgaggaaaggtcccgcttcgagaacagcaagctcatgaagtggtccagacgcgagatccccagacaggttgcactgcagggcgagatctatggcctgcaagtgggagaagtgggcgctcagttcagcagcagattccacgccaagacaggcagccctggcatcagatgtagcgtcgtgaccaaagagaagctgcaggacaatcggttcttcaagaatctgcagagagagggcagactgaccctggacaaaatcgccgtgctgaaagagggcgatctgtacccagacaaaggcggcgagaagttcatcagcctgagcaaggatcggaagtgcgtgaccacacacgccgacatcaacgccgctcagaacctgcagaagcggttctggacaagaacccacggcttctacaaggtgtactgcaaggcctaccaggtggacggccagaccgtgtacatccctgagagcaaggaccagaagcagaagatcatcgaagagttcggcgagggctacttcattctgaaggacggggtgtacgaatgggtcaacgccggcaagctgaaaatcaagaagggcagctccaagcagagcagcagcgagctggtggatagcgacatcctgaaagacagcttcgacctggcctccgagctgaaaggcgaaaagctgatgctgtacagggaccccagcggcaatgtgttccccagcgacaaatggatggccgctggcgtgttcttcggaaagctggaacgcatcctgatcagcaagctgaccaaccagtactccatcagcaccatcgaggacgacagcagcaagcagtctatgaaaaggccggcggccacgaaaaaggccggccaggcaaaaaagaaaaagggatcctacccatacgatgttccagattacgcttatccctacgacgtgcctgattatgcatacccatatgatgtccccgactatgcctaa

SEQ ID NO: 5 - protein, 1361 aa, synthetic construct
  REGION 1..1361: note = BhCas12b GGSGGS-ABE8-Xten20at K255 polypeptide sequence
MAPKKKRKVGIHGVPAAATRSFILKIEPNEEVKKGLWKTHEVLNHGIAYYMNILKLIRQEAIYEHHEQDPKNPKKVSKAEIQAELWDFVLKMQKCNSFTHEVDKDEVFNILRELYEELVPSSVEKKGEANQLSNKFLYPLVDPNSQSGKGTASSGRKPRWYNLKIAGDPSWEEEKKKWEEDKKKDPLAKILGKLAEYGLIPLFIPYTDSNEPIVKEIKWMEKSRNQSVRRLDKDMFIQALERFLSWESWNLKVKEEYEKVEKEYKTLEERIKGGSGGSSEVEFSHEYWMRHALTLAKRARDEREVPVGAVLVLNNRVIGEGWNRAIGLHDPTAHAEIMALRQGGLVMQNYRLYDATLYVTFEPCVMCAGAMIHSRIGRVVFGVRNAKTGAAGSLMDVLHHPGMNHRVEITEGILADECAALLCRFFRMPRRVFNAQKKAQSSTDGSSGSETPGTSESATPESSGEDIQALKALEQYEKERQEQLLRDTLNTNEYRLSKRGLRGWREIIQKWLKMDENEPSEKYLEVFKDYQRKHPREAGDYSVYEFLSKKENHFIWRNHPEYPYLYATFCEIDKKKKDAKQQATFTLADPINHPLWVRFEERSGSNLNKYRILTEQLHTEKLKKKLTVQLDRLIYPTESGGWEEKGKVDIVLLPSRQFYNQIFLDIEEKGKHAFTYKDESIKFPLKGTLGGARVQFDRDHLRRYPHKVESGNVGRIYFNMTVNIEPTESPVSKSLKIHRDDFPKVVNFKPKELTEWIKDSKGKKLKSGIESLEIGLRVMSIDLGQRQAAAASIFEVVDQKPDIEGKLFFPIKGTELYAVHRASFNIKLPGETLVKSREVLRKAREDNLKLMNQKLNFLRNVLHFQQFEDITEREKRVTKWISRQENSDVPLVYQDELIQIRELMYKPYKDWVAFLKQLHKRLEVEIGKEVKHWRKSLSDGRKGLYGISLKNIDEIDRTRKFLLRWSLRPTEPGEVRRLEPGQRFAIDQLNHLNALKEDRLKKMANTIIMHALGYCYDVRKKKWQAKNPACQIILFEDLSNYNPYEERSRFENSKLMKWSRREIPRQVALQGEIYGLQVGEVGAQFSSRFHAKTGSPGIRCSVVTKEKLQDNRFFKNLQREGRLTLDKIAVLKEGDLYPDKGGEKFISLSKDRKCVTTHADINAAQNLQKRFWTRTHGFYKVYCKAYQVDGQTVYIPESKDQKQKIIEEFGEGYFILKDGVYEWVNAGKLKIKKGSSKQSSSELVDSDILKDSFDLASELKGEKLMLYRDPSGNVFPSDKWMAAGVFFGKLERILISKLTNQYSISTIEDDSSKQSMKRPAATKKAGQAKKKKGSYPYDVPDYAYPYDVPDYAYPYDVPDYA

SEQ ID NO: 6 - DNA, 4092 bp, synthetic construct
  misc_feature 1..4092: note = BhCas12b GGSGGS-ABE8-Xten20at D306 polynucleotide sequence
  misc_feature 1..6: note = Kozak sequence
  misc_feature 7..57: note = Sequence encoding N-terminal nuclear localization signal (NLS)
  misc_feature 58..975: note = Sequence encoding BhCas12b
  misc_feature 976..993: note = Sequence encoding a linker
  misc_feature 994..1491: note = Sequence encoding TadA*8
  misc_feature 1492..1551: note = Sequence encoding Xten20 linker
  misc_feature 1552..3954: note = Sequence encoding BhCas12b
  misc_feature 3955..4002: note = Sequence encoding C-terminal NLS
  misc_feature 4003..4008: note = Sequence encoding a GS linker
  misc_feature 4009..4089: note = Sequence encoding 3x hemagglutinin (HA) tag
  source 1..4092: mol_type = other DNA
gccaccatggccccaaagaagaagcggaaggtcggtatccacggagtcccagcagccgccaccagatccttcatcctgaagatcgagcccaacgaggaagtgaagaaaggcctctggaaaacccacgaggtgctgaaccacggaatcgcctactacatgaatatcctgaagctgatccggcaagaggccatctacgagcaccacgagcaggaccccaagaatcccaagaaggtgtccaaggccgagatccaggccgagctgtgggatttcgtgctgaagatgcagaagtgcaacagcttcacacacgaggtggacaaggacgaggtgttcaacatcctgagagagctgtacgaggaactggtgcccagcagcgtggaaaagaagggcgaagccaaccagctgagcaacaagtttctgtaccctctggtggaccccaacagccagtctggaaagggaacagccagcagcggcagaaagcccagatggtacaacctgaagattgccggcgatccctcctgggaagaagagaagaagaagtgggaagaagataagaaaaaggacccgctggccaagatcctgggcaagctggctgagtacggactgatccctctgttcatcccctacaccgacagcaacgagcccatcgtgaaagaaatcaagtggatggaaaagtcccggaaccagagcgtgcggcggctggataaggacatgttcattcaggccctggaacggttcctgagctgggagagctggaacctgaaagtgaaagaggaatacgagaaggtcgagaaagagtacaagaccctggaagagaggatcaaagaggacatccaggctctgaaggctctggaacagtatgagaaagagcggcaagaacagctgctgcgggacaccctgaacaccaacgagtaccggctgagcaagagaggccttagaggctggcgggaaatcatccagaaatggctgaaaatggacggaggctctggaggaagctccgaagtcgagttttcccatgagtactggatgagacacgcattgactctcgcaaagagggctcgagatgaacgcgaggtgcccgtgggggcagtactcgtgctcaacaatcgcgtaatcggcgaaggttggaatagggcaatcggactccacgaccccactgcacatgcggaaatcatggcccttcgacagggagggcttgtgatgcagaattatcgactttatgatgcgacgctgtacgtcacgtttgaaccttgcgtaatgtgcgcgggagctatgattcactcccgcattggacgagttgtattcggtgttcgcaacgccaagacgggtgccgcaggttcactgatggacgtgctgcatcatccaggcatgaaccaccgggtagaaatcacagaaggcatattggcggacgaatgtgcggcgctgttgtgtcgtttttttcgcatgcccaggcgggtctttaacgcccagaaaaaagcacaatcctctactgacggctcttctggatctgaaacacctggcacaagcgagagcgccacccctgagagctctggcgagaacgagccctccgagaagtacctggaagtgttcaaggactaccagcggaagcaccctagagaggccggcgattacagcgtgtacgagttcctgtccaagaaagagaaccacttcatctggcggaatcaccctgagtacccctacctgtacgccaccttctgcgagatcgacaagaaaaagaaggacgccaagcagcaggccaccttcacactggccgatcctatcaatcaccctctgtgggtccgattcgaggaaagaagcggcagcaacctgaacaagtacagaatcctgaccgagcagctgcacaccgagaagctgaagaaaaagctgacagtgcagctggaccggctgatctaccctacagaatctggcggctgggaagagaagggcaaagtggacattgtgctgctgcccagccggcagttctacaaccagatcttcctggacatcgaggaaaagggcaagcacgccttcacctacaaggatgagagcatcaagttccctctgaagggcacactcggcggagccagagtgcagttcgacagagatcacctgagaagataccctcacaaggtggaaagcggcaacgtgggcagaatctacttcaacatgaccgtgaacatcgagcctacagagtccccagtgtccaagtctctgaagatccaccgggacgacttccccaaggtggtcaacttcaagcccaaagaactgaccgagtggatcaaggacagcaagggcaagaaactgaagtccggcatcgagtccctggaaatcggcctgagagtgatgagcatcgacctgggacagagacaggccgctgccgcctctattttcgaggtggtggatcagaagcccgacatcgaaggcaagctgtttttcccaatcaagggcaccgagctgtatgccgtgcacagagccagcttcaacatcaagctgcccggcgagacactggtcaagagcagagaagtgctgcggaaggccagagaggacaatctgaaactgatgaaccagaagctcaacttcctgcggaacgtgctgcacttccagcagttcgaggacatcaccgagagagagaagcgggtcaccaagtggatcagcagacaagagaacagcgacgtgcccctggtgtaccaggatgagctgatccagatccgcgagctgatgtacaagccttacaaggactgggtcgccttcctgaagcagctccacaagagactggaagtcgagatcggcaaagaagtgaagcactggcggaagtccctgagcgacggaagaaagggcctgtacggcatctccctgaagaacatcgacgagatcgatcggacccggaagttcctgctgagatggtccctgaggcctaccgaacctggcgaagtgcgtagactggaacccggccagagattcgccatcgaccagctgaatcacctgaacgccctgaaagaagatcggctgaagaagatggccaacaccatcatcatgcacgccctgggctactgctacgacgtgcggaagaagaaatggcaggctaagaaccccgcctgccagatcatcctgttcgaggatctgagcaactacaacccctacgaggaaaggtcccgcttcgagaacagcaagctcatgaagtggtccagacgcgagatccccagacaggttgcactgcagggcgagatctatggcctgcaagtgggagaagtgggcgctcagttcagcagcagattccacgccaagacaggcagccctggcatcagatgtagcgtcgtgaccaaagagaagctgcaggacaatcggttcttcaagaatctgcagagagagggcagactgaccctggacaaaatcgccgtgctgaaagagggcgatctgtacccagacaaaggcggcgagaagttcatcagcctgagcaaggatcggaagtgcgtgaccacacacgccgacatcaacgccgctcagaacctgcagaagcggttctggacaagaacccacggcttctacaaggtgtactgcaaggcctaccaggtggacggccagaccgtgtacatccctgagagcaaggaccagaagcagaagatcatcgaagagttcggcgagggctacttcattctgaaggacggggtgtacgaatgggtcaacgccggcaagctgaaaatcaagaagggcagctccaagcagagcagcagcgagctggtggatagcgacatcctgaaagacagcttcgacctggcctccgagctgaaaggcgaaaagctgatgctgtacagggaccccagcggcaatgtgttccccagcgacaaatggatggccgctggcgtgttcttcggaaagctggaacgcatcctgatcagcaagctgaccaaccagtactccatcagcaccatcgaggacgacagcagcaagcagtctatgaaaaggccggcggccacgaaaaaggccggccaggcaaaaaagaaaaagggatcctacccatacgatgttccagattacgcttatccctacgacgtgcctgattatgcatacccatatgatgtccccgactatgcctaa

SEQ ID NO: 7 - protein, 1361 aa, synthetic construct
  REGION 1..1361: note = BhCas12b GGSGGS-ABE8-Xten20at D306 polypeptide sequence
MAPKKKRKVGIHGVPAAATRSFILKIEPNEEVKKGLWKTHEVLNHGIAYYMNILKLIRQEAIYEHHEQDPKNPKKVSKAEIQAELWDFVLKMQKCNSFTHEVDKDEVFNILRELYEELVPSSVEKKGEANQLSNKFLYPLVDPNSQSGKGTASSGRKPRWYNLKIAGDPSWEEEKKKWEEDKKKDPLAKILGKLAEYGLIPLFIPYTDSNEPIVKEIKWMEKSRNQSVRRLDKDMFIQALERFLSWESWNLKVKEEYEKVEKEYKTLEERIKEDIQALKALEQYEKERQEQLLRDTLNTNEYRLSKRGLRGWREIIQKWLKMDGGSGGSSEVEFSHEYWMRHALTLAKRARDEREVPVGAVLVLNNRVIGEGWNRAIGLHDPTAHAEIMALRQGGLVMQNYRLYDATLYVTFEPCVMCAGAMIHSRIGRVVFGVRNAKTGAAGSLMDVLHHPGMNHRVEITEGILADECAALLCRFFRMPRRVFNAQKKAQSSTDGSSGSETPGTSESATPESSGENEPSEKYLEVFKDYQRKHPREAGDYSVYEFLSKKENHFIWRNHPEYPYLYATFCEIDKKKKDAKQQATFTLADPINHPLWVRFEERSGSNLNKYRILTEQLHTEKLKKKLTVQLDRLIYPTESGGWEEKGKVDIVLLPSRQFYNQIFLDIEEKGKHAFTYKDESIKFPLKGTLGGARVQFDRDHLRRYPHKVESGNVGRIYFNMTVNIEPTESPVSKSLKIHRDDFPKVVNFKPKELTEWIKDSKGKKLKSGIESLEIGLRVMSIDLGQRQAAAASIFEVVDQKPDIEGKLFFPIKGTELYAVHRASFNIKLPGETLVKSREVLRKAREDNLKLMNQKLNFLRNVLHFQQFEDITEREKRVTKWISRQENSDVPLVYQDELIQIRELMYKPYKDWVAFLKQLHKRLEVEIGKEVKHWRKSLSDGRKGLYGISLKNIDEIDRTRKFLLRWSLRPTEPGEVRRLEPGQRFAIDQLNHLNALKEDRLKKMANTIIMHALGYCYDVRKKKWQAKNPACQIILFEDLSNYNPYEERSRFENSKLMKWSRREIPRQVALQGEIYGLQVGEVGAQFSSRFHAKTGSPGIRCSVVTKEKLQDNRFFKNLQREGRLTLDKIAVLKEGDLYPDKGGEKFISLSKDRKCVTTHADINAAQNLQKRFWTRTHGFYKVYCKAYQVDGQTVYIPESKDQKQKIIEEFGEGYFILKDGVYEWVNAGKLKIKKGSSKQSSSELVDSDILKDSFDLASELKGEKLMLYRDPSGNVFPSDKWMAAGVFFGKLERILISKLTNQYSISTIEDDSSKQSMKRPAATKKAGQAKKKKGSYPYDVPDYAYPYDVPDYAYPYDVPDYA

SEQ ID NO: 8 - DNA, 4092 bp, synthetic construct
  misc_feature 1..4092: note = BhCas12b GGSGGS-ABE8-Xten20at D980 polynucleotide sequence
  misc_feature 1..6: note = Kozak sequence
  misc_feature 7..57: note = Sequence encoding N-terminal nuclear localization signal (NLS)
  misc_feature 58..2997: note = Sequence encoding BhCas12b
  misc_feature 2998..3015: note = Sequence encoding a linker
  misc_feature 3016..3513: note = Sequence encoding TadA*8
  misc_feature 3514..3573: note = Sequence encoding Xten20 linker
  misc_feature 3574..3954: note = Sequence encoding BhCas12b
  misc_feature 3955..4002: note = Sequence encoding C-terminal NLS
  misc_feature 4003..4008: note = Sequence encoding a GS linker
  misc_feature 4009..4089: note = Sequence encoding 3x hemagglutinin (HA) tag
  source 1..4092: mol_type = other DNA
gccaccatggccccaaagaagaagcggaaggtcggtatccacggagtcccagcagccgccaccagatccttcatcctgaagatcgagcccaacgaggaagtgaagaaaggcctctggaaaacccacgaggtgctgaaccacggaatcgcctactacatgaatatcctgaagctgatccggcaagaggccatctacgagcaccacgagcaggaccccaagaatcccaagaaggtgtccaaggccgagatccaggccgagctgtgggatttcgtgctgaagatgcagaagtgcaacagcttcacacacgaggtggacaaggacgaggtgttcaacatcctgagagagctgtacgaggaactggtgcccagcagcgtggaaaagaagggcgaagccaaccagctgagcaacaagtttctgtaccctctggtggaccccaacagccagtctggaaagggaacagccagcagcggcagaaagcccagatggtacaacctgaagattgccggcgatccctcctgggaagaagagaagaagaagtgggaagaagataagaaaaaggacccgctggccaagatcctgggcaagctggctgagtacggactgatccctctgttcatcccctacaccgacagcaacgagcccatcgtgaaagaaatcaagtggatggaaaagtcccggaaccagagcgtgcggcggctggataaggacatgttcattcaggccctggaacggttcctgagctgggagagctggaacctgaaagtgaaagaggaatacgagaaggtcgagaaagagtacaagaccctggaagagaggatcaaagaggacatccaggctctgaaggctctggaacagtatgagaaagagcggcaagaacagctgctgcgggacaccctgaacaccaacgagtaccggctgagcaagagaggccttagaggctggcgggaaatcatccagaaatggctgaaaatggacgagaacgagccctccgagaagtacctggaagtgttcaaggactaccagcggaagcaccctagagaggccggcgattacagcgtgtacgagttcctgtccaagaaagagaaccacttcatctggcggaatcaccctgagtacccctacctgtacgccaccttctgcgagatcgacaagaaaaagaaggacgccaagcagcaggccaccttcacactggccgatcctatcaatcaccctctgtgggtccgattcgaggaaagaagcggcagcaacctgaacaagtacagaatcctgaccgagcagctgcacaccgagaagctgaagaaaaagctgacagtgcagctggaccggctgatctaccctacagaatctggcggctgggaagagaagggcaaagtggacattgtgctgctgcccagccggcagttctacaaccagatcttcctggacatcgaggaaaagggcaagcacgccttcacctacaaggatgagagcatcaagttccctctgaagggcacactcggcggagccagagtgcagttcgacagagatcacctgagaagataccctcacaaggtggaaagcggcaacgtgggcagaatctacttcaacatgaccgtgaacatcgagcctacagagtccccagtgtccaagtctctgaagatccaccgggacgacttccccaaggtggtcaacttcaagcccaaagaactgaccgagtggatcaaggacagcaagggcaagaaactgaagtccggcatcgagtccctggaaatcggcctgagagtgatgagcatcgacctgggacagagacaggccgctgccgcctctattttcgaggtggtggatcagaagcccgacatcgaaggcaagctgtttttcccaatcaagggcaccgagctgtatgccgtgcacagagccagcttcaacatcaagctgcccggcgagacactggtcaagagcagagaagtgctgcggaaggccagagaggacaatctgaaactgatgaaccagaagctcaacttcctgcggaacgtgctgcacttccagcagttcgaggacatcaccgagagagagaagcgggtcaccaagtggatcagcagacaagagaacagcgacgtgcccctggtgtaccaggatgagctgatccagatccgcgagctgatgtacaagccttacaaggactgggtcgccttcctgaagcagctccacaagagactggaagtcgagatcggcaaagaagtgaagcactggcggaagtccctgagcgacggaagaaagggcctgtacggcatctccctgaagaacatcgacgagatcgatcggacccggaagttcctgctgagatggtccctgaggcctaccgaacctggcgaagtgcgtagactggaacccggccagagattcgccatcgaccagctgaatcacctgaacgccctgaaagaagatcggctgaagaagatggccaacaccatcatcatgcacgccctgggctactgctacgacgtgcggaagaagaaatggcaggctaagaaccccgcctgccagatcatcctgttcgaggatctgagcaactacaacccctacgaggaaaggtcccgcttcgagaacagcaagctcatgaagtggtccagacgcgagatccccagacaggttgcactgcagggcgagatctatggcctgcaagtgggagaagtgggcgctcagttcagcagcagattccacgccaagacaggcagccctggcatcagatgtagcgtcgtgaccaaagagaagctgcaggacaatcggttcttcaagaatctgcagagagagggcagactgaccctggacaaaatcgccgtgctgaaagagggcgatctgtacccagacaaaggcggcgagaagttcatcagcctgagcaaggatcggaagtgcgtgaccacacacgccgacatcaacgccgctcagaacctgcagaagcggttctggacaagaacccacggcttctacaaggtgtactgcaaggcctaccaggtggacggaggctctggaggaagctccgaagtcgagttttcccatgagtactggatgagacacgcattgactctcgcaaagagggctcgagatgaacgcgaggtgcccgtgggggcagtactcgtgctcaacaatcgcgtaatcggcgaaggttggaatagggcaatcggactccacgaccccactgcacatgcggaaatcatggcccttcgacagggagggcttgtgatgcagaattatcgactttatgatgcgacgctgtacgtcacgtttgaaccttgcgtaatgtgcgcgggagctatgattcactcccgcattggacgagttgtattcggtgttcgcaacgccaagacgggtgccgcaggttcactgatggacgtgctgcatcatccaggcatgaaccaccgggtagaaatcacagaaggcatattggcggacgaatgtgcggcgctgttgtgtcgtttttttcgcatgcccaggcgggtctttaacgcccagaaaaaagcacaatcctctactgacggctcttctggatctgaaacacctggcacaagcgagagcgccacccctgagagctctggcggccagaccgtgtacatccctgagagcaaggaccagaagcagaagatcatcgaagagttcggcgagggctacttcattctgaaggacggggtgtacgaatgggtcaacgccggcaagctgaaaatcaagaagggcagctccaagcagagcagcagcgagctggtggatagcgacatcctgaaagacagcttcgacctggcctccgagctgaaaggcgaaaagctgatgctgtacagggaccccagcggcaatgtgttccccagcgacaaatggatggccgctggcgtgttcttcggaaagctggaacgcatcctgatcagcaagctgaccaaccagtactccatcagcaccatcgaggacgacagcagcaagcagtctatgaaaaggccggcggccacgaaaaaggccggccaggcaaaaaagaaaaagggatcctacccatacgatgttccagattacgcttatccctacgacgtgcctgattatgcatacccatatgatgtccccgactatgcctaa

SEQ ID NO: 9 - protein, 1361 aa, synthetic construct
  REGION 1..1361: note = BhCas12b GGSGGS-ABE8-Xten20at D980 polypeptide sequence
MAPKKKRKVGIHGVPAAATRSFILKIEPNEEVKKGLWKTHEVLNHGIAYYMNILKLIRQEAIYEHHEQDPKNPKKVSKAEIQAELWDFVLKMQKCNSFTHEVDKDEVFNILRELYEELVPSSVEKKGEANQLSNKFLYPLVDPNSQSGKGTASSGRKPRWYNLKIAGDPSWEEEKKKWEEDKKKDPLAKILGKLAEYGLIPLFIPYTDSNEPIVKEIKWMEKSRNQSVRRLDKDMFIQALERFLSWESWNLKVKEEYEKVEKEYKTLEERIKEDIQALKALEQYEKERQEQLLRDTLNTNEYRLSKRGLRGWREIIQKWLKMDENEPSEKYLEVFKDYQRKHPREAGDYSVYEFLSKKENHFIWRNHPEYPYLYATFCEIDKKKKDAKQQATFTLADPINHPLWVRFEERSGSNLNKYRILTEQLHTEKLKKKLTVQLDRLIYPTESGGWEEKGKVDIVLLPSRQFYNQIFLDIEEKGKHAFTYKDESIKFPLKGTLGGARVQFDRDHLRRYPHKVESGNVGRIYFNMTVNIEPTESPVSKSLKIHRDDFPKVVNFKPKELTEWIKDSKGKKLKSGIESLEIGLRVMSIDLGQRQAAAASIFEVVDQKPDIEGKLFFPIKGTELYAVHRASFNIKLPGETLVKSREVLRKAREDNLKLMNQKLNFLRNVLHFQQFEDITEREKRVTKWISRQENSDVPLVYQDELIQIRELMYKPYKDWVAFLKQLHKRLEVEIGKEVKHWRKSLSDGRKGLYGISLKNIDEIDRTRKFLLRWSLRPTEPGEVRRLEPGQRFAIDQLNHLNALKEDRLKKMANTIIMHALGYCYDVRKKKWQAKNPACQIILFEDLSNYNPYEERSRFENSKLMKWSRREIPRQVALQGEIYGLQVGEVGAQFSSRFHAKTGSPGIRCSVVTKEKLQDNRFFKNLQREGRLTLDKIAVLKEGDLYPDKGGEKFISLSKDRKCVTTHADINAAQNLQKRFWTRTHGFYKVYCKAYQVDGGSGGSSEVEFSHEYWMRHALTLAKRARDEREVPVGAVLVLNNRVIGEGWNRAIGLHDPTAHAEIMALRQGGLVMQNYRLYDATLYVTFEPCVMCAGAMIHSRIGRVVFGVRNAKTGAAGSLMDVLHHPGMNHRVEITEGILADECAALLCRFFRMPRRVFNAQKKAQSSTDGSSGSETPGTSESATPESSGGQTVYIPESKDQKQKIIEEFGEGYFILKDGVYEWVNAGKLKIKKGSSKQSSSELVDSDILKDSFDLASELKGEKLMLYRDPSGNVFPSDKWMAAGVFFGKLERILISKLTNQYSISTIEDDSSKQSMKRPAATKKAGQAKKKKGSYPYDVPDYAYPYDVPDYAYPYDVPDYA

SEQ ID NO: 10 - DNA, 4092 bp, synthetic construct
  misc_feature 1..4092: note = BhCas12b GGSGGS-ABE8-Xten20at K1019 polynucleotide sequence
  misc_feature 1..6: note = Kozak sequence
  misc_feature 7..57: note = Sequence encoding N-terminal nuclear localization signal (NLS)
  misc_feature 58..3114: note = Sequence encoding BhCas12b
  misc_feature 3115..3132: note = Sequence encoding a linker
  misc_feature 3133..3630: note = Sequence encoding TadA*8
  misc_feature 3631..3690: note = Sequence encoding Xten20 linker
  misc_feature 3691..3954: note = Sequence encoding BhCas12b
  misc_feature 3955..4002: note = Sequence encoding C-terminal NLS
  misc_feature 4003..4008: note = Sequence encoding GS linker
  misc_feature 4009..4089: note = Sequence encoding 3x hemagglutinin (HA) tag
  source 1..4092: mol_type = other DNA
gccaccatggccccaaagaagaagcggaaggtcggtatccacggagtcccagcagccgccaccagatccttcatcctgaagatcgagcccaacgaggaagtgaagaaaggcctctggaaaacccacgaggtgctgaaccacggaatcgcctactacatgaatatcctgaagctgatccggcaagaggccatctacgagcaccacgagcaggaccccaagaatcccaagaaggtgtccaaggccgagatccaggccgagctgtgggatttcgtgctgaagatgcagaagtgcaacagcttcacacacgaggtggacaaggacgaggtgttcaacatcctgagagagctgtacgaggaactggtgcccagcagcgtggaaaagaagggcgaagccaaccagctgagcaacaagtttctgtaccctctggtggaccccaacagccagtctggaaagggaacagccagcagcggcagaaagcccagatggtacaacctgaagattgccggcgatccctcctgggaagaagagaagaagaagtgggaagaagataagaaaaaggacccgctggccaagatcctgggcaagctggctgagtacggactgatccctctgttcatcccctacaccgacagcaacgagcccatcgtgaaagaaatcaagtggatggaaaagtcccggaaccagagcgtgcggcggctggataaggacatgttcattcaggccctggaacggttcctgagctgggagagctggaacctgaaagtgaaagaggaatacgagaaggtcgagaaagagtacaagaccctggaagagaggatcaaagaggacatccaggctctgaaggctctggaacagtatgagaaagagcggcaagaacagctgctgcgggacaccctgaacaccaacgagtaccggctgagcaagagaggccttagaggctggcgggaaatcatccagaaatggctgaaaatggacgagaacgagccctccgagaagtacctggaagtgttcaaggactaccagcggaagcaccctagagaggccggcgattacagcgtgtacgagttcctgtccaagaaagagaaccacttcatctggcggaatcaccctgagtacccctacctgtacgccaccttctgcgagatcgacaagaaaaagaaggacgccaagcagcaggccaccttcacactggccgatcctatcaatcaccctctgtgggtccgattcgaggaaagaagcggcagcaacctgaacaagtacagaatcctgaccgagcagctgcacaccgagaagctgaagaaaaagctgacagtgcagctggaccggctgatctaccctacagaatctggcggctgggaagagaagggcaaagtggacattgtgctgctgcccagccggcagttctacaaccagatcttcctggacatcgaggaaaagggcaagcacgccttcacctacaaggatgagagcatcaagttccctctgaagggcacactcggcggagccagagtgcagttcgacagagatcacctgagaagataccctcacaaggtggaaagcggcaacgtgggcagaatctacttcaacatgaccgtgaacatcgagcctacagagtccccagtgtccaagtctctgaagatccaccgggacgacttccccaaggtggtcaacttcaagcccaaagaactgaccgagtggatcaaggacagcaagggcaagaaactgaagtccggcatcgagtccctggaaatcggcctgagagtgatgagcatcgacctgggacagagacaggccgctgccgcctctattttcgaggtggtggatcagaagcccgacatcgaaggcaagctgtttttcccaatcaagggcaccgagctgtatgccgtgcacagagccagcttcaacatcaagctgcccggcgagacactggtcaagagcagagaagtgctgcggaaggccagagaggacaatctgaaactgatgaaccagaagctcaacttcctgcggaacgtgctgcacttccagcagttcgaggacatcaccgagagagagaagcgggtcaccaagtggatcagcagacaagagaacagcgacgtgcccctggtgtaccaggatgagctgatccagatccgcgagctgatgtacaagccttacaaggactgggtcgccttcctgaagcagctccacaagagactggaagtcgagatcggcaaagaagtgaagcactggcggaagtccctgagcgacggaagaaagggcctgtacggcatctccctgaagaacatcgacgagatcgatcggacccggaagttcctgctgagatggtccctgaggcctaccgaacctggcgaagtgcgtagactggaacccggccagagattcgccatcgaccagctgaatcacctgaacgccctgaaagaagatcggctgaagaagatggccaacaccatcatcatgcacgccctgggctactgctacgacgtgcggaagaagaaatggcaggctaagaaccccgcctgccagatcatcctgttcgaggatctgagcaactacaacccctacgaggaaaggtcccgcttcgagaacagcaagctcatgaagtggtccagacgcgagatccccagacaggttgcactgcagggcgagatctatggcctgcaagtgggagaagtgggcgctcagttcagcagcagattccacgccaagacaggcagccctggcatcagatgtagcgtcgtgaccaaagagaagctgcaggacaatcggttcttcaagaatctgcagagagagggcagactgaccctggacaaaatcgccgtgctgaaagagggcgatctgtacccagacaaaggcggcgagaagttcatcagcctgagcaaggatcggaagtgcgtgaccacacacgccgacatcaacgccgctcagaacctgcagaagcggttctggacaagaacccacggcttctacaaggtgtactgcaaggcctaccaggtggacggccagaccgtgtacatccctgagagcaaggaccagaagcagaagatcatcgaagagttcggcgagggctacttcattctgaaggacggggtgtacgaatgggtcaacgccggcaagggaggctctggaggaagctccgaagtcgagttttcccatgagtactggatgagacacgcattgactctcgcaaagagggctcgagatgaacgcgaggtgcccgtgggggcagtactcgtgctcaacaatcgcgtaatcggcgaaggttggaatagggcaatcggactccacgaccccactgcacatgcggaaatcatggcccttcgacagggagggcttgtgatgcagaattatcgactttatgatgcgacgctgtacgtcacgtttgaaccttgcgtaatgtgcgcgggagctatgattcactcccgcattggacgagttgtattcggtgttcgcaacgccaagacgggtgccgcaggttcactgatggacgtgctgcatcatccaggcatgaaccaccgggtagaaatcacagaaggcatattggcggacgaatgtgcggcgctgttgtgtcgtttttttcgcatgcccaggcgggtctttaacgcccagaaaaaagcacaatcctctactgacggctcttctggatctgaaacacctggcacaagcgagagcgccacccctgagagctctggcctgaaaatcaagaagggcagctccaagcagagcagcagcgagctggtggatagcgacatcctgaaagacagcttcgacctggcctccgagctgaaaggcgaaaagctgatgctgtacagggaccccagcggcaatgtgttccccagcgacaaatggatggccgctggcgtgttcttcggaaagctggaacgcatcctgatcagcaagctgaccaaccagtactccatcagcaccatcgaggacgacagcagcaagcagtctatgaaaaggccggcggccacgaaaaaggccggccaggcaaaaaagaaaaagggatcctacccatacgatgttccagattacgcttatccctacgacgtgcctgattatgcatacccatatgatgtccccgactatgcctaa

SEQ ID NO: 11 - protein, 1361 aa, synthetic construct
  REGION 1..1361: note = BhCas12b GGSGGS-ABE8-Xten20at K1019 polypeptide sequence
MAPKKKRKVGIHGVPAAATRSFILKIEPNEEVKKGLWKTHEVLNHGIAYYMNILKLIRQEAIYEHHEQDPKNPKKVSKAEIQAELWDFVLKMQKCNSFTHEVDKDEVFNILRELYEELVPSSVEKKGEANQLSNKFLYPLVDPNSQSGKGTASSGRKPRWYNLKIAGDPSWEEEKKKWEEDKKKDPLAKILGKLAEYGLIPLFIPYTDSNEPIVKEIKWMEKSRNQSVRRLDKDMFIQALERFLSWESWNLKVKEEYEKVEKEYKTLEERIKEDIQALKALEQYEKERQEQLLRDTLNTNEYRLSKRGLRGWREIIQKWLKMDENEPSEKYLEVFKDYQRKHPREAGDYSVYEFLSKKENHFIWRNHPEYPYLYATFCEIDKKKKDAKQQATFTLADPINHPLWVRFEERSGSNLNKYRILTEQLHTEKLKKKLTVQLDRLIYPTESGGWEEKGKVDIVLLPSRQFYNQIFLDIEEKGKHAFTYKDESIKFPLKGTLGGARVQFDRDHLRRYPHKVESGNVGRIYFNMTVNIEPTESPVSKSLKIHRDDFPKVVNFKPKELTEWIKDSKGKKLKSGIESLEIGLRVMSIDLGQRQAAAASIFEVVDQKPDIEGKLFFPIKGTELYAVHRASFNIKLPGETLVKSREVLRKAREDNLKLMNQKLNFLRNVLHFQQFEDITEREKRVTKWISRQENSDVPLVYQDELIQIRELMYKPYKDWVAFLKQLHKRLEVEIGKEVKHWRKSLSDGRKGLYGISLKNIDEIDRTRKFLLRWSLRPTEPGEVRRLEPGQRFAIDQLNHLNALKEDRLKKMANTIIMHALGYCYDVRKKKWQAKNPACQIILFEDLSNYNPYEERSRFENSKLMKWSRREIPRQVALQGEIYGLQVGEVGAQFSSRFHAKTGSPGIRCSVVTKEKLQDNRFFKNLQREGRLTLDKIAVLKEGDLYPDKGGEKFISLSKDRKCVTTHADINAAQNLQKRFWTRTHGFYKVYCKAYQVDGQTVYIPESKDQKQKIIEEFGEGYFILKDGVYEWVNAGKGGSGGSSEVEFSHEYWMRHALTLAKRARDEREVPVGAVLVLNNRVIGEGWNRAIGLHDPTAHAEIMALRQGGLVMQNYRLYDATLYVTFEPCVMCAGAMIHSRIGRVVFGVRNAKTGAAGSLMDVLHHPGMNHRVEITEGILADECAALLCRFFRMPRRVFNAQKKAQSSTDGSSGSETPGTSESATPESSGLKIKKGSSKQSSSELVDSDILKDSFDLASELKGEKLMLYRDPSGNVFPSDKWMAAGVFFGKLERILISKLTNQYSISTIEDDSSKQSMKRPAATKKAGQAKKKKGSYPYDVPDYAYPYDVPDYAYPYDVPDYA

SEQ ID NO: 12-189 - skipped (178 entries)

SEQ ID NO: 190 - protein, 18 aa, synthetic construct
  REGION 1..18: note = synthetic peptide
KRTADGSEFESPKKKRKV

SEQ ID NO: 191 - protein, 16 aa, synthetic construct
  REGION 1..16: note = synthetic peptide
KRPAATKKAGQAKKKK

SEQ ID NO: 192 - protein, 17 aa, synthetic construct
  REGION 1..17: note = synthetic peptide
KKTELQTTNAENKTKKL

SEQ ID NO: 193 - protein, 19 aa, synthetic construct
  REGION 1..19: note = synthetic peptide
KRGINDRNFWRGENGRKTR

SEQ ID NO: 194 - protein, 16 aa, synthetic construct
  REGION 1..16: note = synthetic peptide
RKSGKIAAIVVKRPRK

SEQ ID NO: 195 - protein, 7 aa, synthetic construct
  REGION 1..7: note = synthetic peptide
PKKKRKV

SEQ ID NO: 196 - protein, 30 aa, synthetic construct
  REGION 1..30: note = synthetic polypeptide
MDSLLMNRRKFLYQFKNVRWAKGRRETYLC

SEQ ID NO: 197 - protein, 1368 aa, Streptococcus pyogenes [sequence omitted]

SEQ ID NO: 198 - DNA, 4104 bp, Streptococcus pyogenes
  misc_feature 1..4104: note = wild type spCas9 polynucleotide sequence
  source 1..4104: mol_type = genomic DNA
atggataagaaatactcaataggcttagatatcggcacaaatagcgtcggatgggcggtgatcactgatgattataaggttccgtctaaaaagttcaaggttctgggaaatacagaccgccacagtatcaaaaaaaatcttataggggctcttttatttggcagtggagagacagcggaagcgactcgtctcaaacggacagctcgtagaaggtatacacgtcggaagaatcgtatttgttatctacaggagattttttcaaatgagatggcgaaagtagatgatagtttctttcatcgacttgaagagtcttttttggtggaagaagacaagaagcatgaacgtcatcctatttttggaaatatagtagatgaagttgcttatcatgagaaatatccaactatctatcatctgcgaaaaaaattggcagattctactgataaagcggatttgcgcttaatctatttggccttagcgcatatgattaagtttcgtggtcattttttgattgagggagatttaaatcctgataatagtgatgtggacaaactatttatccagttggtacaaatctacaatcaattatttgaagaaaaccctattaacgcaagtagagtagatgctaaagcgattctttctgcacgattgagtaaatcaagacgattagaaaatctcattgctcagctccccggtgagaagagaaatggcttgtttgggaatctcattgctttgtcattgggattgacccctaattttaaatcaaattttgatttggcagaagatgctaaattacagctttcaaaagatacttacgatgatgatttagataatttattggcgcaaattggagatcaatatgctgatttgtttttggcagctaagaatttatcagatgctattttactttcagatatcctaagagtaaatagtgaaataactaaggctcccctatcagcttcaatgattaagcgctacgatgaacatcatcaagacttgactcttttaaaagctttagttcgacaacaacttccagaaaagtataaagaaatcttttttgatcaatcaaaaaacggatatgcaggttatattgatgggggagctagccaagaagaattttataaatttatcaaaccaattttagaaaaaatggatggtactgaggaattattggtgaaactaaatcgtgaagatttgctgcgcaagcaacggacctttgacaacggctctattccccatcaaattcacttgggtgagctgcatgctattttgagaagacaagaagacttttatccatttttaaaagacaatcgtgagaagattgaaaaaatcttgacttttcgaattccttattatgttggtccattggcgcgtggcaatagtcgttttgcatggatgactcggaagtctgaagaaacaattaccccatggaattttgaagaagttgtcgataaaggtgcttcagctcaatcatttattgaacgcatgacaaactttgataaaaatcttccaaatgaaaaagtactaccaaaacatagtttgctttatgagtattttacggtttataacgaattgacaaaggtcaaatatgttactgagggaatgcgaaaaccagcatttctttcaggtgaacagaagaaagccattgttgatttactcttcaaaacaaatcgaaaagtaaccgttaagcaattaaaagaagattatttcaaaaaaatagaatgttttgatagtgttgaaatttcaggagttgaagatagatttaatgcttcattaggcgcctaccatgatttgctaaaaattattaaagataaagattttttggataatgaagaaaatgaagatatcttagaggatattgttttaacattgaccttatttgaagatagggggatgattgaggaaagacttaaaacatatgctcacctctttgatgataaggtgatgaaacagcttaaacgtcgccgttatactggttggggacgtttgtctcgaaaattgattaatggtattagggataagcaatctggcaaaacaatattagattttttgaaatcagatggttttgccaatcgcaattttatgcagctgatccatgatgatagtttgacatttaaagaagatattcaaaaagcacaggtgtctggacaaggccatagtttacatgaacagattgctaacttagctggcagtcctgctattaaaaaaggtattttacagactgtaaaaattgttgatgaactggtcaaagtaatggggcataagccagaaaatatcgttattgaaatggcacgtgaaaatcagacaactcaaaagggccagaaaaattcgcgagagcgtatgaaacgaatcgaagaaggtatcaaagaattaggaagtcagattcttaaagagcatcctgttgaaaatactcaattgcaaaatgaaaagctctatctctattatctacaaaatggaagagacatgtatgtggaccaagaattagatattaatcgtttaagtgattatgatgtcgatcacattgttccacaaagtttcattaaagacgattcaatagacaataaggtactaacgcgttctgataaaaatcgtggtaaatcggataacgttccaagtgaagaagtagtcaaaaagatgaaaaactattggagacaacttctaaacgccaagttaatcactcaacgtaagtttgataatttaacgaaagctgaacgtggaggtttgagtgaacttgataaagctggttttatcaaacgccaattggttgaaactcgccaaatcactaagcatgtggcacaaattttggatagtcgcatgaatactaaatacgatgaaaatgataaacttattcgagaggttaaagtgattaccttaaaatctaaattagtttctgacttccgaaaagatttccaattctataaagtacgtgagattaacaattaccatcatgcccatgatgcgtatctaaatgccgtcgttggaactgctttgattaagaaatatccaaaacttgaatcggagtttgtctatggtgattataaagtttatgatgttcgtaaaatgattgctaagtctgagcaagaaataggcaaagcaaccgcaaaatatttcttttactctaatatcatgaacttcttcaaaacagaaattacacttgcaaatggagagattcgcaaacgccctctaatcgaaactaatggggaaactggagaaattgtctgggataaagggcgagattttgccacagtgcgcaaagtattgtccatgccccaagtcaatattgtcaagaaaacagaagtacagacaggcggattctccaaggagtcaattttaccaaaaagaaattcggacaagcttattgctcgtaaaaaagactgggatccaaaaaaatatggtggttttgatagtccaacggtagcttattcagtcctagtggttgctaaggtggaaaaagggaaatcgaagaagttaaaatccgttaaagagttactagggatcacaattatggaaagaagttcctttgaaaaaaatccgattgactttttagaagctaaaggatataaggaagttaaaaaagacttaatcattaaactacctaaatatagtctttttgagttagaaaacggtcgtaaacggatgctggctagtgccggagaattacaaaaaggaaatgagctggctctgccaagcaaatatgtgaattttttatatttagctagtcattatgaaaagttgaagggtagtccagaagataacgaacaaaaacaattgtttgtggagcagcataagcattatttagatgagattattgagcaaatcagtgaattttctaagcgtgttattttagcagatgccaatttagataaagttcttagtgcatataacaaacatagagacaaaccaatacgtgaacaagcagaaaatattattcatttatttacgttgacgaatcttggagctcccgctgcttttaaatattttgatacaacaattgatcgtaaacgatatacgtctacaaaagaagttttagatgccactcttatccatcaatccatcactggtctttatgaaacacgcattgatttgagtcagctaggaggtgactga

SEQ ID NO: 199 - protein, 1367 aa, Streptococcus pyogenes
  REGION 1..1367: note = MISC_FEATURE - spCas9 polypeptide sequence
MDKKYSIGLDIGTNSVGWAVITDDYKVPSKKFKVLGNTDRHSIKKNLIGALLFGSGETAEATRLKRTARRRYTRRKNRICYLQEIFSNEMAKVDDSFFHRLEESFLVEEDKKHERHPIFGNIVDEVAYHEKYPTIYHLRKKLADSTDKADLRLIYLALAHMIKFRGHFLIEGDLNPDNSDVDKLFIQLVQIYNQLFEENPINASRVDAKAILSARLSKSRRLENLIAQLPGEKRNGLFGNLIALSLGLTPNFKSNFDLAEDAKLQLSKDTYDDDLDNLLAQIGDQYADLFLAAKNLSDAILLSDILRVNSEITKAPLSASMIKRYDEHHQDLTLLKALVRQQLPEKYKEIFFDQSKNGYAGYIDGGASQEEFYKFIKPILEKMDGTEELLVKLNREDLLRKQRTFDNGSIPHQIHLGELHAILRRQEDFYPFLKDNREKIEKILTFRIPYYVGPLARGNSRFAWMTRKSEETITPWNFEEVVDKGASAQSFIERMTNFDKNLPNEKVLPKHSLLYEYFTVYNELTKVKYVTEGMRKPAFLSGEQKKAIVDLLFKTNRKVTVKQLKEDYFKKIECFDSVEISGVEDRFNASLGAYHDLLKIIKDKDFLDNEENEDILEDIVLTLTLFEDRGMIEERLKTYAHLFDDKVMKQLKRRRYTGWGRLSRKLINGIRDKQSGKTILDFLKSDGFANRNFMQLIHDDSLTFKEDIQKAQVSGQGHSLHEQIANLAGSPAIKKGILQTVKIVDELVKVMGHKPENIVIEMARENQTTQKGQKNSRERMKRIEEGIKELGSQILKEHPVENTQLQNEKLYLYYLQNGRDMYVDQELDINRLSDYDVDHIVPQSFIKDDSIDNKVLTRSDKNRGKSDNVPSEEVVKKMKNYWRQLLNAKLITQRKFDNLTKAERGGLSELDKAGFIKRQLVETRQITKHVAQILDSRMNTKYDENDKLIREVKVITLKSKLVSDFRKDFQFYKVREINNYHHAHDAYLNAVVGTALIKKYPKLESEFVYGDYKVYDVRKMIAKSEQEIGKATAKYFFYSNIMNFFKTEITLANGEIRKRPLIETNGETGEIVWDKGRDFATVRKVLSMPQVNIVKKTEVQTGGFSKESILPKRNSDKLIARKKDWDPKKYGGFDSPTVAYSVLVVAKVEKGKSKKLKSVKELLGITIMERSSFEKNPIDFLEAKGYKEVKKDLIIKLPKYSLFELENGRKRMLASAGELQKGNELALPSKYVNFLYLASHYEKLKGSPEDNEQKQLFVEQHKHYLDEIIEQISEFSKRVILADANLDKVLSAYNKHRDKPIREQAENIIHLFTLTNLGAPAAFKYFDTTIDRKRYTSTKEVLDATLIHQSITGLYETRIDLSQLGGD

SEQ ID NO: 200 - DNA, 4212 bp, synthetic construct
  misc_feature 1..4212: note = wild-type Cas9 polynucleotide sequence
  misc_feature 5..58: note = RuvC domain
  misc_feature 718..764: note = RuvC domain
  misc_feature 772..901: note = HNH domain
  misc_feature 906..1101: note = RuvC domain
  source 1..4212: mol_type = other DNA
atggataaaaagtattctattggtttagacatcggcactaattccgttggatgggctgtcataaccgatgaatacaaagtaccttcaaagaaatttaaggtgttggggaacacagaccgtcattcgattaaaaagaatcttatcggtgccctcctattcgatagtggcgaaacggcagaggcgactcgcctgaaacgaaccgctcggagaaggtatacacgtcgcaagaaccgaatatgttacttacaagaaatttttagcaatgagatggccaaagttgacgattctttctttcaccgtttggaagagtccttccttgtcgaagaggacaagaaacatgaacggcaccccatctttggaaacatagtagatgaggtggcatatcatgaaaagtacccaacgatttatcacctcagaaaaaagctagttgactcaactgataaagcggacctgaggttaatctacttggctcttgcccatatgataaagttccgtgggcactttctcattgagggtgatctaaatccggacaactcggatgtcgacaaactgttcatccagttagtacaaacctataatcagttgtttgaagagaaccctataaatgcaagtggcgtggatgcgaaggctattcttagcgcccgcctctctaaatcccgacggctagaaaacctgatcgcacaattacccggagagaagaaaaatgggttgttcggtaaccttatagcgctctcactaggcctgacaccaaattttaagtcgaacttcgacttagctgaagatgccaaattgcagcttagtaaggacacgtacgatgacgatctcgacaatctactggcacaaattggagatcagtatgcggacttatttttggctgccaaaaaccttagcgatgcaatcctcctatctgacatactgagagttaatactgagattaccaaggcgccgttatccgcttcaatgatcaaaaggtacgatgaacatcaccaagacttgacacttctcaaggccctagtccgtcagcaactgcctgagaaatataaggaaatattctttgatcagtcgaaaaacgggtacgcaggttatattgacggcggagcgagtcaagaggaattctacaagtttatcaaacccatattagagaagatggatgggacggaagagttgcttgtaaaactcaatcgcgaagatctactgcgaaagcagcggactttcgacaacggtagcattccacatcaaatccacttaggcgaattgcatgctatacttagaaggcaggaggatttttatccgttcctcaaagacaatcgtgaaaagattgagaaaatcctaacctttcgcataccttactatgtgggacccctggcccgagggaactctcggttcgcatggatgacaagaaagtccgaagaaacgattactccatggaattttgaggaagttgtcgataaaggtgcgtcagctcaatcgttcatcgagaggatgaccaactttgacaagaatttaccgaacgaaaaagtattgcctaagcacagtttactttacgagtatttcacagtgtacaatgaactcacgaaagttaagtatgtcactgagggcatgcgtaaacccgcctttctaagcggagaacagaagaaagcaatagtagatctgttattcaagaccaaccgcaaagtgacagttaagcaattgaaagaggactactttaagaaaattgaatgcttcgattctgtcgagatctccggggtagaagatcgatttaatgcgtcacttggtacgtatcatgacctcctaaagataattaaagataaggacttcctggataacgaagagaatgaagatatcttagaagatatagtgttgactcttaccctctttgaagatcgggaaatgattgaggaaagactaaaaacatacgctcacctgttcgacgataaggttatgaaacagttaaagaggcgtcgctatacgggctggggacgattgtcgcggaaacttatcaacgggataagagacaagcaaagtggtaaaactattctcgattttctaaagagcgacggcttcgccaataggaactttatgcagctgatccatgatgactctttaaccttcaaagaggatatacaaaaggcacaggtttccggacaaggggactcattgcacgaacatattgcgaatcttgctggttcgccagccatcaaaaagggcatactccagacagtcaaagtagtggatgagctagttaaggtcatgggacgtcacaaaccggaaaacattgtaatcgagatggcacgcgaaaatcaaacgactcagaaggggcaaaaaaacagtcgagagcggatgaagagaatagaagagggtattaaagaactgggcagccagatcttaaaggagcatcctgtggaaaatacccaattgcagaacgagaaactttacctctattacctacaaaatggaagggacatgtatgttgatcaggaactggacataaaccgtttatctgattacgacgtcgatcacattgtaccccaatcctttttgaaggacgattcaatcgacaataaagtgcttacacgctcggataagaaccgagggaaaagtgacaatgttccaagcgaggaagtcgtaaagaaaatgaagaactattggcggcagctcctaaatgcgaaactgataacgcaaagaaagttcgataacttaactaaagctgagaggggtggcttgtctgaacttgacaaggccggatttattaaacgtcagctcgtggaaacccgccaaatcacaaagcatgttgcacagatactagattcccgaatgaatacgaaatacgacgagaacgataagctgattcgggaagtcaaagtaatcactttaaagtcaaaattggtgtcggacttcagaaaggattttcaattctataaagttagggagataaataactaccaccatgcgcacgacgcttatcttaatgccgtcgtagggaccgcactcattaagaaatacccgaagctagaaagtgagtttgtgtatggtgattacaaagtttatgacgtccgtaagatgatcgcgaaaagcgaacaggagataggcaaggctacagccaaatacttcttttattctaacattatgaatttctttaagacggaaatcactctggcaaacggagagatacgcaaacgacctttaattgaaaccaatggggagacaggtgaaatcgtatgggataagggccgggacttcgcgacggtgagaaaagttttgtccatgccccaagtcaacatagtaaagaaaactgaggtgcagaccggagggttttcaaaggaatcgattcttccaaaaaggaatagtgataagctcatcgctcgtaaaaaggactgggacccgaaaaagtacggtggcttcgatagccctacagttgcctattctgtcctagtagtggcaaaagttgagaagggaaaatccaagaaactgaagtcagtcaaagaattattggggataacgattatggagcgctcgtcttttgaaaagaaccccatcgacttccttgaggcgaaaggttacaaggaagtaaaaaaggatctcataattaaactaccaaagtatagtctgtttgagttagaaaatggccgaaaacggatgttggctagcgccggagagcttcaaaaggggaacgaactcgcactaccgtctaaatacgtgaatttcctgtatttagcgtcccattacgagaagttgaaaggttcacctgaagataacgaacagaagcaactttttgttgagcagcacaaacattatctcgacgaaatcatagagcaaatttcggaattcagtaagagagtcatcctagctgatgccaatctggacaaagtattaagcgcatacaacaagcacagggataaacccatacgtgagcaggcggaaaatattatccatttgtttactcttaccaacctcggcgctccagccgcattcaagtattttgacacaacgatagatcgcaaacgatacacttctaccaaggaggtgctagacgcgacactgattcaccaatccatcacgggattatatgaaactcggatagatttgtcacagcttgggggtgacggatcccccaagaagaagaggaaagtctcgagcgactacaaagaccatgacggtgattataaagatcatgacatcgattacaaggatgacgatgacaaggctgcagga

SEQ ID NO: 201 - protein, 1368 aa, synthetic construct
  REGION 1..1368: note = exemplary catalytically active Cas9 nickase (nCas9) polypeptide sequence
MDKKYSIGLAIGTNSVGWAVITDEYKVPSKKFKVLGNTDRHSIKKNLIGALLFDSGETAEATRLKRTARRRYTRRKNRICYLQEIFSNEMAKVDDSFFHRLEESFLVEEDKKHERHPIFGNIVDEVAYHEKYPTIYHLRKKLVDSTDKADLRLIYLALAHMIKFRGHFLIEGDLNPDNSDVDKLFIQLVQTYNQLFEENPINASGVDAKAILSARLSKSRRLENLIAQLPGEKKNGLFGNLIALSLGLTPNFKSNFDLAEDAKLQLSKDTYDDDLDNLLAQIGDQYADLFLAAKNLSDAILLSDILRVNTEITKAPLSASMIKRYDEHHQDLTLLKALVRQQLPEKYKEIFFDQSKNGYAGYIDGGASQEEFYKFIKPILEKMDGTEELLVKLNREDLLRKQRTFDNGSIPHQIHLGELHAILRRQEDFYPFLKDNREKIEKILTFRIPYYVGPLARGNSRFAWMTRKSEETITPWNFEEVVDKGASAQSFIERMTNFDKNLPNEKVLPKHSLLYEYFTVYNELTKVKYVTEGMRKPAFLSGEQKKAIVDLLFKTNRKVTVKQLKEDYFKKIECFDSVEISGVEDRFNASLGTYHDLLKIIKDKDFLDNEENEDILEDIVLTLTLFEDREMIEERLKTYAHLFDDKVMKQLKRRRYTGWGRLSRKLINGIRDKQSGKTILDFLKSDGFANRNFMQLIHDDSLTFKEDIQKAQVSGQGDSLHEHIANLAGSPAIKKGILQTVKVVDELVKVMGRHKPENIVIEMARENQTTQKGQKNSRERMKRIEEGIKELGSQILKEHPVENTQLQNEKLYLYYLQNGRDMYVDQELDINRLSDYDVDHIVPQSFLKDDSIDNKVLTRSDKNRGKSDNVPSEEVVKKMKNYWRQLLNAKLITQRKFDNLTKAERGGLSELDKAGFIKRQLVETRQITKHVAQILDSRMNTKYDENDKLIREVKVITLKSKLVSDFRKDFQFYKVREINNYHHAHDAYLNAVVGTALIKKYPKLESEFVYGDYKVYDVRKMIAKSEQEIGKATAKYFFYSNIMNFFKTEITLANGEIRKRPLIETNGETGEIVWDKGRDFATVRKVLSMPQVNIVKKTEVQTGGFSKESILPKRNSDKLIARKKDWDPKKYGGFDSPTVAYSVLVVAKVEKGKSKKLKSVKELLGITIMERSSFEKNPIDFLEAKGYKEVKKDLIIKLPKYSLFELENGRKRMLASAGELQKGNELALPSKYVNFLYLASHYEKLKGSPEDNEQKQLFVEQHKHYLDEIIEQISEFSKRVILADANLDKVLSAYNKHRDKPIREQAENIIHLFTLTNLGAPAAFKYFDTTIDRKRYTSTKEVLDATLIHQSITGLYETRIDLSQLGGD

SEQ ID NO: 202 - DNA, 4107 bp, Streptococcus pyogenes
  misc_feature 1..4107: note = Cas9 from Streptococcus pyogenes (NCBI Ref. Seq.: NC_002737.2)polynucleotide sequence
  source 1..4107: mol_type = genomic DNA
atggataagaaatactcaataggcttagatatcggcacaaatagcgtcggatgggcggtgatcactgatgaatataaggttccgtctaaaaagttcaaggttctgggaaatacagaccgccacagtatcaaaaaaaatcttataggggctcttttatttgacagtggagagacagcggaagcgactcgtctcaaacggacagctcgtagaaggtatacacgtcggaagaatcgtatttgttatctacaggagattttttcaaatgagatggcgaaagtagatgatagtttctttcatcgacttgaagagtcttttttggtggaagaagacaagaagcatgaacgtcatcctatttttggaaatatagtagatgaagttgcttatcatgagaaatatccaactatctatcatctgcgaaaaaaattggtagattctactgataaagcggatttgcgcttaatctatttggccttagcgcatatgattaagtttcgtggtcattttttgattgagggagatttaaatcctgataatagtgatgtggacaaactatttatccagttggtacaaacctacaatcaattatttgaagaaaaccctattaacgcaagtggagtagatgctaaagcgattctttctgcacgattgagtaaatcaagacgattagaaaatctcattgctcagctccccggtgagaagaaaaatggcttatttgggaatctcattgctttgtcattgggtttgacccctaattttaaatcaaattttgatttggcagaagatgctaaattacagctttcaaaagatacttacgatgatgatttagataatttattggcgcaaattggagatcaatatgctgatttgtttttggcagctaagaatttatcagatgctattttactttcagatatcctaagagtaaatactgaaataactaaggctcccctatcagcttcaatgattaaacgctacgatgaacatcatcaagacttgactcttttaaaagctttagttcgacaacaacttccagaaaagtataaagaaatcttttttgatcaatcaaaaaacggatatgcaggttatattgatgggggagctagccaagaagaattttataaatttatcaaaccaattttagaaaaaatggatggtactgaggaattattggtgaaactaaatcgtgaagatttgctgcgcaagcaacggacctttgacaacggctctattccccatcaaattcacttgggtgagctgcatgctattttgagaagacaagaagacttttatccatttttaaaagacaatcgtgagaagattgaaaaaatcttgacttttcgaattccttattatgttggtccattggcgcgtggcaatagtcgttttgcatggatgactcggaagtctgaagaaacaattaccccatggaattttgaagaagttgtcgataaaggtgcttcagctcaatcatttattgaacgcatgacaaactttgataaaaatcttccaaatgaaaaagtactaccaaaacatagtttgctttatgagtattttacggtttataacgaattgacaaaggtcaaatatgttactgaaggaatgcgaaaaccagcatttctttcaggtgaacagaagaaagccattgttgatttactcttcaaaacaaatcgaaaagtaaccgttaagcaattaaaagaagattatttcaaaaaaatagaatgttttgatagtgttgaaatttcaggagttgaagatagatttaatgcttcattaggtacctaccatgatttgctaaaaattattaaagataaagattttttggataatgaagaaaatgaagatatcttagaggatattgttttaacattgaccttatttgaagatagggagatgattgaggaaagacttaaaacatatgctcacctctttgatgataaggtgatgaaacagcttaaacgtcgccgttatactggttggggacgtttgtctcgaaaattgattaatggtattagggataagcaatctggcaaaacaatattagattttttgaaatcagatggttttgccaatcgcaattttatgcagctgatccatgatgatagtttgacatttaaagaagacattcaaaaagcacaagtgtctggacaaggcgatagtttacatgaacatattgcaaatttagctggtagccctgctattaaaaaaggtattttacagactgtaaaagttgttgatgaattggtcaaagtaatggggcggcataagccagaaaatatcgttattgaaatggcacgtgaaaatcagacaactcaaaagggccagaaaaattcgcgagagcgtatgaaacgaatcgaagaaggtatcaaagaattaggaagtcagattcttaaagagcatcctgttgaaaatactcaattgcaaaatgaaaagctctatctctattatctccaaaatggaagagacatgtatgtggaccaagaattagatattaatcgtttaagtgattatgatgtcgatcacattgttccacaaagtttccttaaagacgattcaatagacaataaggtcttaacgcgttctgataaaaatcgtggtaaatcggataacgttccaagtgaagaagtagtcaaaaagatgaaaaactattggagacaacttctaaacgccaagttaatcactcaacgtaagtttgataatttaacgaaagctgaacgtggaggtttgagtgaacttgataaagctggttttatcaaacgccaattggttgaaactcgccaaatcactaagcatgtggcacaaattttggatagtcgcatgaatactaaatacgatgaaaatgataaacttattcgagaggttaaagtgattaccttaaaatctaaattagtttctgacttccgaaaagatttccaattctataaagtacgtgagattaacaattaccatcatgcccatgatgcgtatctaaatgccgtcgttggaactgctttgattaagaaatatccaaaacttgaatcggagtttgtctatggtgattataaagtttatgatgttcgtaaaatgattgctaagtctgagcaagaaataggcaaagcaaccgcaaaatatttcttttactctaatatcatgaacttcttcaaaacagaaattacacttgcaaatggagagattcgcaaacgccctctaatcgaaactaatggggaaactggagaaattgtctgggataaagggcgagattttgccacagtgcgcaaagtattgtccatgccccaagtcaatattgtcaagaaaacagaagtacagacaggcggattctccaaggagtcaattttaccaaaaagaaattcggacaagcttattgctcgtaaaaaagactgggatccaaaaaaatatggtggttttgatagtccaacggtagcttattcagtcctagtggttgctaaggtggaaaaagggaaatcgaagaagttaaaatccgttaaagagttactagggatcacaattatggaaagaagttcctttgaaaaaaatccgattgactttttagaagctaaaggatataaggaagttaaaaaagacttaatcattaaactacctaaatatagtctttttgagttagaaaacggtcgtaaacggatgctggctagtgccggagaattacaaaaaggaaatgagctggctctgccaagcaaatatgtgaattttttatatttagctagtcattatgaaaagttgaagggtagtccagaagataacgaacaaaaacaattgtttgtggagcagcataagcattatttagatgagattattgagcaaatcagtgaattttctaagcgtgttattttagcagatgccaatttagataaagttcttagtgcatataacaaacatagagacaaaccaatacgtgaacaagcagaaaatattattcatttatttacgttgacgaatcttggagctcccgctgcttttaaatattttgatacaacaattgatcgtaaacgatatacgtctacaaaagaagttttagatgccactcttatccatcaatccatcactggtctttatgaaacacgcattgatttgagtcagctaggaggtgactga

SEQ ID NO: 203 - protein, 1368 aa, synthetic construct
  REGION 1..1368: note = catalytically inactive Cas9 (dCas9)polypeptide sequence
  REGION 5..58: note = MISC_FEATURE - RuvC domain
  REGION 718..764: note = MISC_FEATURE - RuvC domain
  REGION 773..902: note = MISC_FEATURE - HNH domain
  REGION 907..1102: note = MISC_FEATURE - RuvC domain
MDKKYSIGLAIGTNSVGWAVITDEYKVPSKKFKVLGNTDRHSIKKNLIGALLFDSGETAEATRLKRTARRRYTRRKNRICYLQEIFSNEMAKVDDSFFHRLEESFLVEEDKKHERHPIFGNIVDEVAYHEKYPTIYHLRKKLVDSTDKADLRLIYLALAHMIKFRGHFLIEGDLNPDNSDVDKLFIQLVQTYNQLFEENPINASGVDAKAILSARLSKSRRLENLIAQLPGEKKNGLFGNLIALSLGLTPNFKSNFDLAEDAKLQLSKDTYDDDLDNLLAQIGDQYADLFLAAKNLSDAILLSDILRVNTEITKAPLSASMIKRYDEHHQDLTLLKALVRQQLPEKYKEIFFDQSKNGYAGYIDGGASQEEFYKFIKPILEKMDGTEELLVKLNREDLLRKQRTFDNGSIPHQIHLGELHAILRRQEDFYPFLKDNREKIEKILTFRIPYYVGPLARGNSRFAWMTRKSEETITPWNFEEVVDKGASAQSFIERMTNFDKNLPNEKVLPKHSLLYEYFTVYNELTKVKYVTEGMRKPAFLSGEQKKAIVDLLFKTNRKVTVKQLKEDYFKKIECFDSVEISGVEDRFNASLGTYHDLLKIIKDKDFLDNEENEDILEDIVLTLTLFEDREMIEERLKTYAHLFDDKVMKQLKRRRYTGWGRLSRKLINGIRDKQSGKTILDFLKSDGFANRNFMQLIHDDSLTFKEDIQKAQVSGQGDSLHEHIANLAGSPAIKKGILQTVKVVDELVKVMGRHKPENIVIEMARENQTTQKGQKNSRERMKRIEEGIKELGSQILKEHPVENTQLQNEKLYLYYLQNGRDMYVDQELDINRLSDYDVDAIVPQSFLKDDSIDNKVLTRSDKNRGKSDNVPSEEVVKKMKNYWRQLLNAKLITQRKFDNLTKAERGGLSELDKAGFIKRQLVETRQITKHVAQILDSRMNTKYDENDKLIREVKVITLKSKLVSDFRKDFQFYKVREINNYHHAHDAYLNAVVGTALIKKYPKLESEFVYGDYKVYDVRKMIAKSEQEIGKATAKYFFYSNIMNFFKTEITLANGEIRKRPLIETNGETGEIVWDKGRDFATVRKVLSMPQVNIVKKTEVQTGGFSKESILPKRNSDKLIARKKDWDPKKYGGFDSPTVAYSVLVVAKVEKGKSKKLKSVKELLGITIMERSSFEKNPIDFLEAKGYKEVKKDLIIKLPKYSLFELENGRKRMLASAGELQKGNELALPSKYVNFLYLASHYEKLKGSPEDNEQKQLFVEQHKHYLDEIIEQISEFSKRVILADANLDKVLSAYNKHRDKPIREQAENIIHLFTLTNLGAPAAFKYFDTTIDRKRYTSTKEVLDATLIHQSITGLYETRIDLSQLGGD

SEQ ID NO: 204 - protein, 345 aa, Sulfolobus islandicus
  REGION 1..345: note = MISC_FEATURE - tr|F0NN87|F0NN87_SULIHCRISPR-associatedCasx protein OS =Sulfolobus islandicus (strain HVE10/4) GN = SiH_0402 PE=4; SV = 1);CasX polypeptide sequence
MEVPLYNIFGDNYIIQVATEAENSTIYNNKVEIDDEELRNVLNLAYKIAKNNEDAAAERRGKAKKKKGEEGETTTSNIILPLSGNDKNPWTETLKCYNFPTTVALSEVFKNFSQVKECEEVSAPSFVKPEFYEFGRSPGMVERTRRVKLEVEPHYLIIAAAGWVLTRLGKAKVSEGDYVGVNVFTPTRGILYSLIQNVNGIVPGIKPETAFGLWIARKVVSSVTNPNVSVVRIYTISDAVGQNPTTINGGFSIDLTKLLEKRYLLSERLEAIARNALSISSNMRERYIVLANYIYEYLTGSKRLEDLLYFANRDLIMNLNSDDGKVRDLKLISAYVNGELIRGEG

SEQ ID NO: 205 - protein, 345 aa, Sulfolobus islandicus
  REGION 1..345: note = MISC_FEATURE - tr|F0NH53|F0NH53_SULIR CRISPR associated protein, Casx OS =Sulfolobus islandicus (strain REY15A) GN=SiRe_0771 PE=4 SV=1);CasX polypeptide sequence
MEVPLYNIFGDNYIIQVATEAENSTIYNNKVEIDDEELRNVLNLAYKIAKNNEDAAAERRGKAKKKKGEEGETTTSNIILPLSGNDKNPWTETLKCYNFPTTVALSEVFKNFSQVKECEEVSAPSFVKPEFYKFGRSPGMVERTRRVKLEVEPHYLIMAAAGWVLTRLGKAKVSEGDYVGVNVFTPTRGILYSLIQNVNGIVPGIKPETAFGLWIARKVVSSVTNPNVSVVSIYTISDAVGQNPTTINGGFSIDLTKLLEKRDLLSERLEAIARNALSISSNMRERYIVLANYIYEYLTGSKRLEDLLYFANRDLIMNLNSDDGKVRDLKLISAYVNGELIRGEG

SEQ ID NO: 206 - protein, 987 aa, unidentified
  REGION 1..987: note = MISC_FEATURE - CasX polypeptide sequence
MEKRINKIRKKLSADNATKPVSRSGPMKTLLVRVMTDDLKKRLEKRRKKPEVMPQVISNNAANNLRMLLDDYTKMKEAILQVYWQEFKDDHVGLMCKFAQPASKKIDQNKLKPEMDEKGNLTTAGFACSQCGQPLFVYKLEQVSEKGKAYTNYFGRCNVAEHEKLILLAQLKPVKDSDEAVTYSLGKFGQRALDFYSIHVTKESTHPVKPLAQIAGNRYASGPVGKALSDACMGTIASFLSKYQDIIIEHQKVVKGNQKRLESLRELAGKENLEYPSVTLPPQPHTKEGVDFAYNEVIARVRMWVNLNLWQKLKLSRDDAKPLLRLKGFPSFPVVERRENEVDWWNTINEVKKLIDAKRDMGRVFWSGVTAEKRNTILEGYNYLPNENDHKKREGSLENPKKPAKRQFGDLLLYLEKKYAGDWGKVFDEAWERIDKKIAGLTSHIEREEARNAEDAQSKAVLTDWLRAKASFVLERLKEMDEKEFYACEIQLQKWYGDLRGNPFAVEAENRVVDISGFSIGSDGHSIQYRNLLAWKYLENGKREFYLLMNYGKKGRIRFTDGTDIKKSGKWQGLLYGGGKAKVIDLTFDPDDEQLIILPLAFGTRQGREFIWNDLLSLETGLIKLANGRVIEKTIYNKKIGRDEPALFVALTFERREVVDPSNIKPVNLIGVARGENIPAVIALTDPEGCPLPEFKDSSGGPTDILRIGEGYKEKQRAIQAAKEVEQRRAGGYSRKFASKSRNLADDMVRNSARDLFYHAVTHDAVLVFANLSRGFGRQGKRTFMTERQYTKMEDWLTAKLAYEGLTSKTYLSKTLAQYTSKTCSNCGFTITYADMDVMLVRLKKTSDGWATTLNNKELKAEYQITYYNRYKRQTVEKELSAELDRLSEESGNNDISKWTKGRRDEALFLLKKRFSHRPVQEQFVCLDCGHEVHAAEQAALNIARSWLFLNSNSTEFKSYKSGKQPFVGAWQAFYKRRLKEVWKPNA

SEQ ID NO: 207 - protein, 1210 aa, unidentified
  REGION 1..1210: note = MISC_FEATURE - APG80656.1 CRISPR-associated protein CasY [uncultured Parcubacteria group bacterium]; CasY polypeptide sequence
MSKRHPRISGVKGYRLHAQRLEYTGKSGAMRTIKYPLYSSPSGGRTVPREIVSAINDDYVGLYGLSNFDDLYNAEKRNEEKVYSVLDFWYDCVQYGAVFSYTAPGLLKNVAEVRGGSYELTKTLKGSHLYDELQIDKVIKFLNKKEISRANGSLDKLKKDIIDCFKAEYRERHKDQCNKLADDIKNAKKDAGASLGERQKKLFRDFFGISEQSENDKPSFTNPLNLTCCLLPFDTVNNNRNRGEVLFNKLKEYAQKLDKNEGSLEMWEYIGIGNSGTAFSNFLGEGFLGRLRENKITELKKAMMDITDAWRGQEQEEELEKRLRILAALTIKLREPKFDNHWGGYRSDINGKLSSWLQNYINQTVKIKEDLKGHKKDLKKAKEMINRFGESDTKEEAVVSSLLESIEKIVPDDSADDEKPDIPAIAIYRRFLSDGRLTLNRFVQREDVQEALIKERLEAEKKKKPKKRKKKSDAEDEKETIDFKELFPHLAKPLKLVPNFYGDSKRELYKKYKNAAIYTDALWKAVEKIYKSAFSSSLKNSFFDTDFDKDFFIKRLQKIFSVYRRFNTDKWKPIVKNSFAPYCDIVSLAENEVLYKPKQSRSRKSAAIDKNRVRLPSTENIAKAGIALARELSVAGFDWKDLLKKEEHEEYIDLIELHKTALALLLAVTETQLDISALDFVENGTVKDFMKTRDGNLVLEGRFLEMFSQSIVFSELRGLAGLMSRKEFITRSAIQTMNGKQAELLYIPHEFQSAKITTPKEMSRAFLDLAPAEFATSLEPESLSEKSLLKLKQMRYYPHYFGYELTRTGQGIDGGVAENALRLEKSPVKKREIKCKQYKTLGRGQNKIVLYVRSSYYQTQFLEWFLHRPKNVQTDVAVSGSFLIDEKKVKTRWNYDALTVALEPVSGSERVFVSQPFTIFPEKSAEEEGQRYLGIDIGEYGIAYTALEITGDSAKILDQNFISDPQLKTLREEVKGLKLDQRRGTFAMPSTKIARIRESLVHSLRNRIHHLALKHKAKIVYELEVSRFEEGKQKIKKVYATLKKADVYSEIDADKNLQTTVWGKLAVASEISASYTSQFCGACKKLWRAEMQVDETITTQELIGTVRVIKGGTLIDAIKDFMRPPIFDENDTPFPKYRDFCDKHHISKKMRGNSCLFICPFCRANADADIQASQTIALLRYVKEEKKVEDYFERFRKLKNIKVLGQMKKI

SEQ ID NO: 208 - protein, 1082 aa, Neisseria meningitidis
  REGION 1..1082: note = MISC_FEATURE - NCBI Reference: WP_002235162.1; type II CRISPR RNA-guided endonuclease Cas9; Nme1Cas9 polypeptide sequence
MAAFKPNPINYILGLDIGIASVGWAMVEIDEDENPICLIDLGVRVFERAEVPKTGDSLAMARRLARSVRRLTRRRAHRLLRARRLLKREGVLQAADFDENGLIKSLPNTPWQLRAAALDRKLTPLEWSAVLLHLIKHRGYLSQRKNEGETADKELGALLKGVADNAHALQTGDFRTPAELALNKFEKESGHIRNQRGDYSHTFSRKDLQAELILLFEKQKEFGNPHVSGGLKEGIETLLMTQRPALSGDAVQKMLGHCTFEPAEPKAAKNTYTAERFIWLTKLNNLRILEQGSERPLTDTERATLMDEPYRKSKLTYAQARKLLGLEDTAFFKGLRYGKDNAEASTLMEMKAYHAISRALEKEGLKDKKSPLNLSPELQDEIGTAFSLFKTDEDITGRLKDRIQPEILEALLKHISFDKFVQISLKALRRIVPLMEQGKRYDEACAEIYGDHYGKKNTEEKIYLPPIPADEIRNPVVLRALSQARKVINGVVRRYGSPARIHIETAREVGKSFKDRKEIEKRQEENRKDREKAAAKFREYFPNFVGEPKSKDILKLRLYEQQHGKCLYSGKEINLGRLNEKGYVEIDHALPFSRTWDDSFNNKVLVLGSENQNKGNQTPYEYFNGKDNSREWQEFKARVETSRFPRSKKQRILLQKFDEDGFKERNLNDTRYVNRFLCQFVADRMRLTGKGKKRVFASNGQITNLLRGFWGLRKVRAENDRHHALDAVVVACSTVAMQQKITRFVRYKEMNAFDGKTIDKETGEVLHQKTHFPQPWEFFAQEVMIRVFGKPDGKPEFEEADTPEKLRTLLAEKLSSRPEAVHEYVTPLFVSRAPNRKMSGQGHMETVKSAKRLDEGVSVLRVPLTQLKLKDLEKMVNREREPKLYEALKARLEAHKDDPAKAFAEPFYKYDKAGNRTQQVKAVRVEQVQKTGVWVRNHNGIADNATMVRVDVFEKGDKYYLVPIYSWQVAKGILPDRAVVQGKDEEDWQLIDDSFNFKFSLHPNDLVEVITKKARMFGYFASCHRGTGNINIRIHDLDHKIGKNGILEGIGVKTALSFQKYQIDELGKEIRPCRLKKRPPVR

SEQ ID NO: 209 - protein, 1082 aa, Neisseria meningitidis
  REGION 1..1082: note = MISC_FEATURE - NCBI Reference: WP_002230835; type II CRISPR RNA-guided endonuclease Cas9; Nme2Cas9 polypeptide sequence
MAAFKPNPINYILGLDIGIASVGWAMVEIDEEENPIRLIDLGVRVFERAEVPKTGDSLAMARRLARSVRRLTRRRAHRLLRARRLLKREGVLQAADFDENGLIKSLPNTPWQLRAAALDRKLTPLEWSAVLLHLIKHRGYLSQRKNEGETADKELGALLKGVANNAHALQTGDFRTPAELALNKFEKESGHIRNQRGDYSHTFSRKDLQAELILLFEKQKEFGNPHVSGGLKEGIETLLMTQRPALSGDAVQKMLGHCTFEPAEPKAAKNTYTAERFIWLTKLNNLRILEQGSERPLTDTERATLMDEPYRKSKLTYAQARKLLGLEDTAFFKGLRYGKDNAEASTLMEMKAYHAISRALEKEGLKDKKSPLNLSSELQDEIGTAFSLFKTDEDITGRLKDRVQPEILEALLKHISFDKFVQISLKALRRIVPLMEQGKRYDEACAEIYGDHYGKKNTEEKIYLPPIPADEIRNPVVLRALSQARKVINGVVRRYGSPARIHIETAREVGKSFKDRKEIEKRQEENRKDREKAAAKFREYFPNFVGEPKSKDILKLRLYEQQHGKCLYSGKEINLVRLNEKGYVEIDHALPFSRTWDDSFNNKVLVLGSENQNKGNQTPYEYFNGKDNSREWQEFKARVETSRFPRSKKQRILLQKFDEDGFKECNLNDTRYVNRFLCQFVADHILLTGKGKRRVFASNGQITNLLRGFWGLRKVRAENDRHHALDAVVVACSTVAMQQKITRFVRYKEMNAFDGKTIDKETGKVLHQKTHFPQPWEFFAQEVMIRVFGKPDGKPEFEEADTPEKLRTLLAEKLSSRPEAVHEYVTPLFVSRAPNRKMSGAHKDTLRSAKRFVKHNEKISVKRVWLTEIKLADLENMVNYKNGREIELYEALKARLEAYGGNAKQAFDPKDNPFYKKGGQLVKAVRVEKTQESGVLLNKKNAYTIADNGDMVRVDVFCKVDKKGKNQYFIVPIYAWQVAENILPDIDCKGYRIDDSYTFCFSLHKYDLIAFQKDEKSKVEFAYYINCDSSNGRFYLAWHDKGSKEQQFRISTQNLVLIQKYQVNELGKEIRPCRLKKRPPVR

SEQ ID NO: 210 - protein, 1300 aa, Francisella tularensis
  REGION 1..1300: note = MISC_FEATURE - wild type Cpf1 polypeptide sequence
  source 1..1300: note = subspecies novicida
MSIYQEFVNKYSLSKTLRFELIPQGKTLENIKARGLILDDEKRAKDYKKAKQIIDKYHQFFIEEILSSVCISEDLLQNYSDVYFKLKKSDDDNLQKDFKSAKDTIKKQISEYIKDSEKFKNLFNQNLIDAKKGQESDLILWLKQSKDNGIELFKANSDITDIDEALEIIKSFKGWTTYFKGFHENRKNVYSSNDIPTSIIYRIVDDNLPKFLENKAKYESLKDKAPEAINYEQIKKDLAEELTFDIDYKTSEVNQRVFSLDEVFEIANFNNYLNQSGITKFNTIIGGKFVNGENTKRKGINEYINLYSQQINDKTLKKYKMSVLFKQILSDTESKSFVIDKLEDDSDVVTTMQSFYEQIAAFKTVEEKSIKETLSLLFDDLKAQKLDLSKIYFKNDKSLTDLSQQVFDDYSVIGTAVLEYITQQIAPKNLDNPSKKEQELIAKKTEKAKYLSLETIKLALEEFNKHRDIDKQCRFEEILANFAAIPMIFDEIAQNKDNLAQISIKYQNQGKKDLLQASAEDDVKAIKDLLDQTNNLLHKLKIFHISQSEDKANILDKDEHFYLVFEECYFELANIVPLYNKIRNYITQKPYSDEKFKLNFENSTLANGWDKNKEPDNTAILFIKDDKYYLGVMNKKNNKIFDDKAIKENKGEGYKKIVYKLLPGANKMLPKVFFSAKSIKFYNPSEDILRIRNHSTHTKNGSPQKGYEKFEFNIEDCRKFIDFYKQSISKHPEWKDFGFRFSDTQRYNSIDEFYREVENQGYKLTFENISESYIDSVVNQGKLYLFQIYNKDFSAYSKGRPNLHTLYWKALFDERNLQDVVYKLNGEAELFYRKQSIPKKITHPAKEAIANKNKDNPKKESVFEYDLIKDKRFTEDKFFFHCPITINFKSSGANKFNDEINLLLKEKANDVHILSIDRGERHLAYYTLVDGKGNIIKQDTFNIIGNDRMKTNYHDKLAAIEKDRDSARKDWKKINNIKEMKEGYLSQVVHEIAKLVIEYNAIVVFEDLNFGFKRGRFKVEKQVYQKLEKMLIEKLNYLVFKDNEFDKTGGVLRAYQLTAPFETFKKMGKQTGIIYYVPAGFTSKICPVTGFVNQLYPKYESVSKSQEFFSKFDKICYNLDKGYFEFSFDYKNFGDKAAKGKWTIASFGSRLINFRNSDKNHNWDTREVYPTKELEKLLKDYSIEYGHGECIKAAICGESDKKFFAKLTSVLNTILQMRNSKTGTELDYLISPVADVNGNFFDSRQAPKNMPQDADANGAYHIGLKGLMLLGRIKNNQEGKKLNLVIKNEEYFEFVQNRNN

SEQ ID NO: 211 - protein, 1300 aa, Francisella tularensis
  REGION 1..1300: note = MISC_FEATURE - Cpf1 D917A polypeptide sequence
  source 1..1300: note = subspecies novicida
MSIYQEFVNKYSLSKTLRFELIPQGKTLENIKARGLILDDEKRAKDYKKAKQIIDKYHQFFIEEILSSVCISEDLLQNYSDVYFKLKKSDDDNLQKDFKSAKDTIKKQISEYIKDSEKFKNLFNQNLIDAKKGQESDLILWLKQSKDNGIELFKANSDITDIDEALEIIKSFKGWTTYFKGFHENRKNVYSSNDIPTSIIYRIVDDNLPKFLENKAKYESLKDKAPEAINYEQIKKDLAEELTFDIDYKTSEVNQRVFSLDEVFEIANFNNYLNQSGITKFNTIIGGKFVNGENTKRKGINEYINLYSQQINDKTLKKYKMSVLFKQILSDTESKSFVIDKLEDDSDVVTTMQSFYEQIAAFKTVEEKSIKETLSLLFDDLKAQKLDLSKIYFKNDKSLTDLSQQVFDDYSVIGTAVLEYITQQIAPKNLDNPSKKEQELIAKKTEKAKYLSLETIKLALEEFNKHRDIDKQCRFEEILANFAAIPMIFDEIAQNKDNLAQISIKYQNQGKKDLLQASAEDDVKAIKDLLDQTNNLLHKLKIFHISQSEDKANILDKDEHFYLVFEECYFELANIVPLYNKIRNYITQKPYSDEKFKLNFENSTLANGWDKNKEPDNTAILFIKDDKYYLGVMNKKNNKIFDDKAIKENKGEGYKKIVYKLLPGANKMLPKVFFSAKSIKFYNPSEDILRIRNHSTHTKNGSPQKGYEKFEFNIEDCRKFIDFYKQSISKHPEWKDFGFRFSDTQRYNSIDEFYREVENQGYKLTFENISESYIDSVVNQGKLYLFQIYNKDFSAYSKGRPNLHTLYWKALFDERNLQDVVYKLNGEAELFYRKQSIPKKITHPAKEAIANKNKDNPKKESVFEYDLIKDKRFTEDKFFFHCPITINFKSSGANKFNDEINLLLKEKANDVHILSIARGERHLAYYTLVDGKGNIIKQDTFNIIGNDRMKTNYHDKLAAIEKDRDSARKDWKKINNIKEMKEGYLSQVVHEIAKLVIEYNAIVVFEDLNFGFKRGRFKVEKQVYQKLEKMLIEKLNYLVFKDNEFDKTGGVLRAYQLTAPFETFKKMGKQTGIIYYVPAGFTSKICPVTGFVNQLYPKYESVSKSQEFFSKFDKICYNLDKGYFEFSFDYKNFGDKAAKGKWTIASFGSRLINFRNSDKNHNWDTREVYPTKELEKLLKDYSIEYGHGECIKAAICGESDKKFFAKLTSVLNTILQMRNSKTGTELDYLISPVADVNGNFFDSRQAPKNMPQDADANGAYHIGLKGLMLLGRIKNNQEGKKLNLVIKNEEYFEFVQNRNN

SEQ ID NO: 212 - protein, 1300 aa, Francisella tularensis
  REGION 1..1300: note = MISC_FEATURE - Cpf1 E1006A polypeptide sequence
  source 1..1300: note = subspecies novicida
MSIYQEFVNKYSLSKTLRFELIPQGKTLENIKARGLILDDEKRAKDYKKAKQIIDKYHQFFIEEILSSVCISEDLLQNYSDVYFKLKKSDDDNLQKDFKSAKDTIKKQISEYIKDSEKFKNLFNQNLIDAKKGQESDLILWLKQSKDNGIELFKANSDITDIDEALEIIKSFKGWTTYFKGFHENRKNVYSSNDIPTSIIYRIVDDNLPKFLENKAKYESLKDKAPEAINYEQIKKDLAEELTFDIDYKTSEVNQRVFSLDEVFEIANFNNYLNQSGITKFNTIIGGKFVNGENTKRKGINEYINLYSQQINDKTLKKYKMSVLFKQILSDTESKSFVIDKLEDDSDVVTTMQSFYEQIAAFKTVEEKSIKETLSLLFDDLKAQKLDLSKIYFKNDKSLTDLSQQVFDDYSVIGTAVLEYITQQIAPKNLDNPSKKEQELIAKKTEKAKYLSLETIKLALEEFNKHRDIDKQCRFEEILANFAAIPMIFDEIAQNKDNLAQISIKYQNQGKKDLLQASAEDDVKAIKDLLDQTNNLLHKLKIFHISQSEDKANILDKDEHFYLVFEECYFELANIVPLYNKIRNYITQKPYSDEKFKLNFENSTLANGWDKNKEPDNTAILFIKDDKYYLGVMNKKNNKIFDDKAIKENKGEGYKKIVYKLLPGANKMLPKVFFSAKSIKFYNPSEDILRIRNHSTHTKNGSPQKGYEKFEFNIEDCRKFIDFYKQSISKHPEWKDFGFRFSDTQRYNSIDEFYREVENQGYKLTFENISESYIDSVVNQGKLYLFQIYNKDFSAYSKGRPNLHTLYWKALFDERNLQDVVYKLNGEAELFYRKQSIPKKITHPAKEAIANKNKDNPKKESVFEYDLIKDKRFTEDKFFFHCPITINFKSSGANKFNDEINLLLKEKANDVHILSIDRGERHLAYYTLVDGKGNIIKQDTFNIIGNDRMKTNYHDKLAAIEKDRDSARKDWKKINNIKEMKEGYLSQVVHEIAKLVIEYNAIVVFADLNFGFKRGRFKVEKQVYQKLEKMLIEKLNYLVFKDNEFDKTGGVLRAYQLTAPFETFKKMGKQTGIIYYVPAGFTSKICPVTGFVNQLYPKYESVSKSQEFFSKFDKICYNLDKGYFEFSFDYKNFGDKAAKGKWTIASFGSRLINFRNSDKNHNWDTREVYPTKELEKLLKDYSIEYGHGECIKAAICGESDKKFFAKLTSVLNTILQMRNSKTGTELDYLISPVADVNGNFFDSRQAPKNMPQDADANGAYHIGLKGLMLLGRIKNNQEGKKLNLVIKNEEYFEFVQNRNN

SEQ ID NO: 213 - protein, 1300 aa, Francisella tularensis
  REGION 1..1300: note = MISC_FEATURE - Cpf1 D1255A polypeptide sequence
  source 1..1300: note = subspecies novicida
MSIYQEFVNKYSLSKTLRFELIPQGKTLENIKARGLILDDEKRAKDYKKAKQIIDKYHQFFIEEILSSVCISEDLLQNYSDVYFKLKKSDDDNLQKDFKSAKDTIKKQISEYIKDSEKFKNLFNQNLIDAKKGQESDLILWLKQSKDNGIELFKANSDITDIDEALEIIKSFKGWTTYFKGFHENRKNVYSSNDIPTSIIYRIVDDNLPKFLENKAKYESLKDKAPEAINYEQIKKDLAEELTFDIDYKTSEVNQRVFSLDEVFEIANFNNYLNQSGITKFNTIIGGKFVNGENTKRKGINEYINLYSQQINDKTLKKYKMSVLFKQILSDTESKSFVIDKLEDDSDVVTTMQSFYEQIAAFKTVEEKSIKETLSLLFDDLKAQKLDLSKIYFKNDKSLTDLSQQVFDDYSVIGTAVLEYITQQIAPKNLDNPSKKEQELIAKKTEKAKYLSLETIKLALEEFNKHRDIDKQCRFEEILANFAAIPMIFDEIAQNKDNLAQISIKYQNQGKKDLLQASAEDDVKAIKDLLDQTNNLLHKLKIFHISQSEDKANILDKDEHFYLVFEECYFELANIVPLYNKIRNYITQKPYSDEKFKLNFENSTLANGWDKNKEPDNTAILFIKDDKYYLGVMNKKNNKIFDDKAIKENKGEGYKKIVYKLLPGANKMLPKVFFSAKSIKFYNPSEDILRIRNHSTHTKNGSPQKGYEKFEFNIEDCRKFIDFYKQSISKHPEWKDFGFRFSDTQRYNSIDEFYREVENQGYKLTFENISESYIDSVVNQGKLYLFQIYNKDFSAYSKGRPNLHTLYWKALFDERNLQDVVYKLNGEAELFYRKQSIPKKITHPAKEAIANKNKDNPKKESVFEYDLIKDKRFTEDKFFFHCPITINFKSSGANKFNDEINLLLKEKANDVHILSIDRGERHLAYYTLVDGKGNIIKQDTFNIIGNDRMKTNYHDKLAAIEKDRDSARKDWKKINNIKEMKEGYLSQVVHEIAKLVIEYNAIVVFEDLNFGFKRGRFKVEKQVYQKLEKMLIEKLNYLVFKDNEFDKTGGVLRAYQLTAPFETFKKMGKQTGIIYYVPAGFTSKICPVTGFVNQLYPKYESVSKSQEFFSKFDKICYNLDKGYFEFSFDYKNFGDKAAKGKWTIASFGSRLINFRNSDKNHNWDTREVYPTKELEKLLKDYSIEYGHGECIKAAICGESDKKFFAKLTSVLNTILQMRNSKTGTELDYLISPVADVNGNFFDSRQAPKNMPQDAAANGAYHIGLKGLMLLGRIKNNQEGKKLNLVIKNEEYFEFVQNRNN

SEQ ID NO: 214 - protein, 1300 aa, Francisella tularensis
  REGION 1..1300: note = MISC_FEATURE - Cpf1 D917A/E1006A polypeptide sequence
  source 1..1300: note = subspecies novicida
MSIYQEFVNKYSLSKTLRFELIPQGKTLENIKARGLILDDEKRAKDYKKAKQIIDKYHQFFIEEILSSVCISEDLLQNYSDVYFKLKKSDDDNLQKDFKSAKDTIKKQISEYIKDSEKFKNLFNQNLIDAKKGQESDLILWLKQSKDNGIELFKANSDITDIDEALEIIKSFKGWTTYFKGFHENRKNVYSSNDIPTSIIYRIVDDNLPKFLENKAKYESLKDKAPEAINYEQIKKDLAEELTFDIDYKTSEVNQRVFSLDEVFEIANFNNYLNQSGITKFNTIIGGKFVNGENTKRKGINEYINLYSQQINDKTLKKYKMSVLFKQILSDTESKSFVIDKLEDDSDVVTTMQSFYEQIAAFKTVEEKSIKETLSLLFDDLKAQKLDLSKIYFKNDKSLTDLSQQVFDDYSVIGTAVLEYITQQIAPKNLDNPSKKEQELIAKKTEKAKYLSLETIKLALEEFNKHRDIDKQCRFEEILANFAAIPMIFDEIAQNKDNLAQISIKYQNQGKKDLLQASAEDDVKAIKDLLDQTNNLLHKLKIFHISQSEDKANILDKDEHFYLVFEECYFELANIVPLYNKIRNYITQKPYSDEKFKLNFENSTLANGWDKNKEPDNTAILFIKDDKYYLGVMNKKNNKIFDDKAIKENKGEGYKKIVYKLLPGANKMLPKVFFSAKSIKFYNPSEDILRIRNHSTHTKNGSPQKGYEKFEFNIEDCRKFIDFYKQSISKHPEWKDFGFRFSDTQRYNSIDEFYREVENQGYKLTFENISESYIDSVVNQGKLYLFQIYNKDFSAYSKGRPNLHTLYWKALFDERNLQDVVYKLNGEAELFYRKQSIPKKITHPAKEAIANKNKDNPKKESVFEYDLIKDKRFTEDKFFFHCPITINFKSSGANKFNDEINLLLKEKANDVHILSIARGERHLAYYTLVDGKGNIIKQDTFNIIGNDRMKTNYHDKLAAIEKDRDSARKDWKKINNIKEMKEGYLSQVVHEIAKLVIEYNAIVVFADLNFGFKRGRFKVEKQVYQKLEKMLIEKLNYLVFKDNEFDKTGGVLRAYQLTAPFETFKKMGKQTGIIYYVPAGFTSKICPVTGFVNQLYPKYESVSKSQEFFSKFDKICYNLDKGYFEFSFDYKNFGDKAAKGKWTIASFGSRLINFRNSDKNHNWDTREVYPTKELEKLLKDYSIEYGHGECIKAAICGESDKKFFAKLTSVLNTILQMRNSKTGTELDYLISPVADVNGNFFDSRQAPKNMPQDADANGAYHIGLKGLMLLGRIKNNQEGKKLNLVIKNEEYFEFVQNRNN

SEQ ID NO: 215 - protein, 1300 aa, Francisella tularensis
  REGION 1..1300: note = MISC_FEATURE - Cpf1 D917A/D1255A polypeptide sequence
  source 1..1300: note = subspecies novicida
MSIYQEFVNKYSLSKTLRFELIPQGKTLENIKARGLILDDEKRAKDYKKAKQIIDKYHQFFIEEILSSVCISEDLLQNYSDVYFKLKKSDDDNLQKDFKSAKDTIKKQISEYIKDSEKFKNLFNQNLIDAKKGQESDLILWLKQSKDNGIELFKANSDITDIDEALEIIKSFKGWTTYFKGFHENRKNVYSSNDIPTSIIYRIVDDNLPKFLENKAKYESLKDKAPEAINYEQIKKDLAEELTFDIDYKTSEVNQRVFSLDEVFEIANFNNYLNQSGITKFNTIIGGKFVNGENTKRKGINEYINLYSQQINDKTLKKYKMSVLFKQILSDTESKSFVIDKLEDDSDVVTTMQSFYEQIAAFKTVEEKSIKETLSLLFDDLKAQKLDLSKIYFKNDKSLTDLSQQVFDDYSVIGTAVLEYITQQIAPKNLDNPSKKEQELIAKKTEKAKYLSLETIKLALEEFNKHRDIDKQCRFEEILANFAAIPMIFDEIAQNKDNLAQISIKYQNQGKKDLLQASAEDDVKAIKDLLDQTNNLLHKLKIFHISQSEDKANILDKDEHFYLVFEECYFELANIVPLYNKIRNYITQKPYSDEKFKLNFENSTLANGWDKNKEPDNTAILFIKDDKYYLGVMNKKNNKIFDDKAIKENKGEGYKKIVYKLLPGANKMLPKVFFSAKSIKFYNPSEDILRIRNHSTHTKNGSPQKGYEKFEFNIEDCRKFIDFYKQSISKHPEWKDFGFRFSDTQRYNSIDEFYREVENQGYKLTFENISESYIDSVVNQGKLYLFQIYNKDFSAYSKGRPNLHTLYWKALFDERNLQDVVYKLNGEAELFYRKQSIPKKITHPAKEAIANKNKDNPKKESVFEYDLIKDKRFTEDKFFFHCPITINFKSSGANKFNDEINLLLKEKANDVHILSIARGERHLAYYTLVDGKGNIIKQDTFNIIGNDRMKTNYHDKLAAIEKDRDSARKDWKKINNIKEMKEGYLSQVVHEIAKLVIEYNAIVVFEDLNFGFKRGRFKVEKQVYQKLEKMLIEKLNYLVFKDNEFDKTGGVLRAYQLTAPFETFKKMGKQTGIIYYVPAGFTSKICPVTGFVNQLYPKYESVSKSQEFFSKFDKICYNLDKGYFEFSFDYKNFGDKAAKGKWTIASFGSRLINFRNSDKNHNWDTREVYPTKELEKLLKDYSIEYGHGECIKAAICGESDKKFFAKLTSVLNTILQMRNSKTGTELDYLISPVADVNGNFFDSRQAPKNMPQDAAANGAYHIGLKGLMLLGRIKNNQEGKKLNLVIKNEEYFEFVQNRNN

SEQ ID NO: 216 - protein, 1300 aa, Francisella tularensis
  REGION 1..1300: note = MISC_FEATURE - Cpf1 E1006A/D1255A polypeptide sequence
  source 1..1300: note = subspecies novicida
MSIYQEFVNKYSLSKTLRFELIPQGKTLENIKARGLILDDEKRAKDYKKAKQIIDKYHQFFIEEILSSVCISEDLLQNYSDVYFKLKKSDDDNLQKDFKSAKDTIKKQISEYIKDSEKFKNLFNQNLIDAKKGQESDLILWLKQSKDNGIELFKANSDITDIDEALEIIKSFKGWTTYFKGFHENRKNVYSSNDIPTSIIYRIVDDNLPKFLENKAKYESLKDKAPEAINYEQIKKDLAEELTFDIDYKTSEVNQRVFSLDEVFEIANFNNYLNQSGITKFNTIIGGKFVNGENTKRKGINEYINLYSQQINDKTLKKYKMSVLFKQILSDTESKSFVIDKLEDDSDVVTTMQSFYEQIAAFKTVEEKSIKETLSLLFDDLKAQKLDLSKIYFKNDKSLTDLSQQVFDDYSVIGTAVLEYITQQIAPKNLDNPSKKEQELIAKKTEKAKYLSLETIKLALEEFNKHRDIDKQCRFEEILANFAAIPMIFDEIAQNKDNLAQISIKYQNQGKKDLLQASAEDDVKAIKDLLDQTNNLLHKLKIFHISQSEDKANILDKDEHFYLVFEECYFELANIVPLYNKIRNYITQKPYSDEKFKLNFENSTLANGWDKNKEPDNTAILFIKDDKYYLGVMNKKNNKIFDDKAIKENKGEGYKKIVYKLLPGANKMLPKVFFSAKSIKFYNPSEDILRIRNHSTHTKNGSPQKGYEKFEFNIEDCRKFIDFYKQSISKHPEWKDFGFRFSDTQRYNSIDEFYREVENQGYKLTFENISESYIDSVVNQGKLYLFQIYNKDFSAYSKGRPNLHTLYWKALFDERNLQDVVYKLNGEAELFYRKQSIPKKITHPAKEAIANKNKDNPKKESVFEYDLIKDKRFTEDKFFFHCPITINFKSSGANKFNDEINLLLKEKANDVHILSIDRGERHLAYYTLVDGKGNIIKQDTFNIIGNDRMKTNYHDKLAAIEKDRDSARKDWKKINNIKEMKEGYLSQVVHEIAKLVIEYNAIVVFADLNFGFKRGRFKVEKQVYQKLEKMLIEKLNYLVFKDNEFDKTGGVLRAYQLTAPFETFKKMGKQTGIIYYVPAGFTSKICPVTGFVNQLYPKYESVSKSQEFFSKFDKICYNLDKGYFEFSFDYKNFGDKAAKGKWTIASFGSRLINFRNSDKNHNWDTREVYPTKELEKLLKDYSIEYGHGECIKAAICGESDKKFFAKLTSVLNTILQMRNSKTGTELDYLISPVADVNGNFFDSRQAPKNMPQDAAANGAYHIGLKGLMLLGRIKNNQEGKKLNLVIKNEEYFEFVQNRNN

SEQ ID NO: 217 - protein, 1300 aa, Francisella tularensis
  REGION 1..1300: note = MISC_FEATURE - Cpf1 D917A/E1006A/D1255A polypeptide sequence
  source 1..1300: note = subspecies novicida
MSIYQEFVNKYSLSKTLRFELIPQGKTLENIKARGLILDDEKRAKDYKKAKQIIDKYHQFFIEEILSSVCISEDLLQNYSDVYFKLKKSDDDNLQKDFKSAKDTIKKQISEYIKDSEKFKNLFNQNLIDAKKGQESDLILWLKQSKDNGIELFKANSDITDIDEALEIIKSFKGWTTYFKGFHENRKNVYSSNDIPTSIIYRIVDDNLPKFLENKAKYESLKDKAPEAINYEQIKKDLAEELTFDIDYKTSEVNQRVFSLDEVFEIANFNNYLNQSGITKFNTIIGGKFVNGENTKRKGINEYINLYSQQINDKTLKKYKMSVLFKQILSDTESKSFVIDKLEDDSDVVTTMQSFYEQIAAFKTVEEKSIKETLSLLFDDLKAQKLDLSKIYFKNDKSLTDLSQQVFDDYSVIGTAVLEYITQQIAPKNLDNPSKKEQELIAKKTEKAKYLSLETIKLALEEFNKHRDIDKQCRFEEILANFAAIPMIFDEIAQNKDNLAQISIKYQNQGKKDLLQASAEDDVKAIKDLLDQTNNLLHKLKIFHISQSEDKANILDKDEHFYLVFEECYFELANIVPLYNKIRNYITQKPYSDEKFKLNFENSTLANGWDKNKEPDNTAILFIKDDKYYLGVMNKKNNKIFDDKAIKENKGEGYKKIVYKLLPGANKMLPKVFFSAKSIKFYNPSEDILRIRNHSTHTKNGSPQKGYEKFEFNIEDCRKFIDFYKQSISKHPEWKDFGFRFSDTQRYNSIDEFYREVENQGYKLTFENISESYIDSVVNQGKLYLFQIYNKDFSAYSKGRPNLHTLYWKALFDERNLQDVVYKLNGEAELFYRKQSIPKKITHPAKEAIANKNKDNPKKESVFEYDLIKDKRFTEDKFFFHCPITINFKSSGANKFNDEINLLLKEKANDVHILSIARGERHLAYYTLVDGKGNIIKQDTFNIIGNDRMKTNYHDKLAAIEKDRDSARKDWKKINNIKEMKEGYLSQVVHEIAKLVIEYNAIVVFADLNFGFKRGRFKVEKQVYQKLEKMLIEKLNYLVFKDNEFDKTGGVLRAYQLTAPFETFKKMGKQTGIIYYVPAGFTSKICPVTGFVNQLYPKYESVSKSQEFFSKFDKICYNLDKGYFEFSFDYKNFGDKAAKGKWTIASFGSRLINFRNSDKNHNWDTREVYPTKELEKLLKDYSIEYGHGECIKAAICGESDKKFFAKLTSVLNTILQMRNSKTGTELDYLISPVADVNGNFFDSRQAPKNMPQDAAANGAYHIGLKGLMLLGRIKNNQEGKKLNLVIKNEEYFEFVQNRNN

SEQ ID NO: 218 - protein, 1052 aa, Staphylococcus aureus
  REGION 1..1052: note = MISC_FEATURE - Exemplary SaCas9 polypeptide sequence
KRNYILGLDIGITSVGYGIIDYETRDVIDAGVRLFKEANVENNEGRRSKRGARRLKRRRRHRIQRVKKLLFDYNLLTDHSELSGINPYEARVKGLSQKLSEEEFSAALLHLAKRRGVHNVNEVEEDTGNELSTKEQISRNSKALEEKYVAELQLERLKKDGEVRGSINRFKTSDYVKEAKQLLKVQKAYHQLDQSFIDTYIDLLETRRTYYEGPGEGSPFGWKDIKEWYEMLMGHCTYFPEELRSVKYAYNADLYNALNDLNNLVITRDENEKLEYYEKFQIIENVFKQKKKPTLKQIAKEILVNEEDIKGYRVTSTGKPEFTNLKVYHDIKDITARKEIIENAELLDQIAKILTIYQSSEDIQEELTNLNSELTQEEIEQISNLKGYTGTHNLSLKAINLILDELWHTNDNQIAIFNRLKLVPKKVDLSQQKEIPTTLVDDFILSPVVKRSFIQSIKVINAIIKKYGLPNDIIIELAREKNSKDAQKMINEMQKRNRQTNERIEEIIRTTGKENAKYLIEKIKLHDMQEGKCLYSLEAIPLEDLLNNPFNYEVDHIIPRSVSFDNSFNNKVLVKQEENSKKGNRTPFQYLSSSDSKISYETFKKHILNLAKGKGRISKTKKEYLLEERDINRFSVQKDFINRNLVDTRYATRGLMNLLRSYFRVNNLDVKVKSINGGFTSFLRRKWKFKKERNKGYKHHAEDALIIANADFIFKEWKKLDKAKKVMENQMFEEKQAESMPEIETEQEYKEIFITPHQIKHIKDFKDYKYSHRVDKKPNRELINDTLYSTRKDDKGNTLIVNNLNGLYDKDNDKLKKLINKSPEKLLMYHHDPQTYQKLKLIMEQYGDEKNPLYKYYEETGNYLTKYSKKDNGPVIKKIKYYGNKLNAHLDITDDYPNSRNKVVKLSLKPYRFDVYLDNGVYKFVTVKNLDVIKKENYYEVNSKCYEEAKKLKKISNQAEFIASFYNNDLIKINGELYRVIGVNNDLLNRIEVNMIDITYREYLENMNDKRPPRIIKTIASKTQSIKKYSTDILGNLYEVKSKKHPQIIKKG

SEQ ID NO: 219 - protein, 1052 aa, Staphylococcus aureus
  REGION 1..1052: note = MISC_FEATURE - SaCas9n polypeptide sequence
KRNYILGLDIGITSVGYGIIDYETRDVIDAGVRLFKEANVENNEGRRSKRGARRLKRRRRHRIQRVKKLLFDYNLLTDHSELSGINPYEARVKGLSQKLSEEEFSAALLHLAKRRGVHNVNEVEEDTGNELSTKEQISRNSKALEEKYVAELQLERLKKDGEVRGSINRFKTSDYVKEAKQLLKVQKAYHQLDQSFIDTYIDLLETRRTYYEGPGEGSPFGWKDIKEWYEMLMGHCTYFPEELRSVKYAYNADLYNALNDLNNLVITRDENEKLEYYEKFQIIENVFKQKKKPTLKQIAKEILVNEEDIKGYRVTSTGKPEFTNLKVYHDIKDITARKEIIENAELLDQIAKILTIYQSSEDIQEELTNLNSELTQEEIEQISNLKGYTGTHNLSLKAINLILDELWHTNDNQIAIFNRLKLVPKKVDLSQQKEIPTTLVDDFILSPVVKRSFIQSIKVINAIIKKYGLPNDIIIELAREKNSKDAQKMINEMQKRNRQTNERIEEIIRTTGKENAKYLIEKIKLHDMQEGKCLYSLEAIPLEDLLNNPFNYEVDHIIPRSVSFDNSFNNKVLVKQEEASKKGNRTPFQYLSSSDSKISYETFKKHILNLAKGKGRISKTKKEYLLEERDINRFSVQKDFINRNLVDTRYATRGLMNLLRSYFRVNNLDVKVKSINGGFTSFLRRKWKFKKERNKGYKHHAEDALIIANADFIFKEWKKLDKAKKVMENQMFEEKQAESMPEIETEQEYKEIFITPHQIKHIKDFKDYKYSHRVDKKPNRELINDTLYSTRKDDKGNTLIVNNLNGLYDKDNDKLKKLINKSPEKLLMYHHDPQTYQKLKLIMEQYGDEKNPLYKYYEETGNYLTKYSKKDNGPVIKKIKYYGNKLNAHLDITDDYPNSRNKVVKLSLKPYRFDVYLDNGVYKFVTVKNLDVIKKENYYEVNSKCYEEAKKLKKISNQAEFIASFYNNDLIKINGELYRVIGVNNDLLNRIEVNMIDITYREYLENMNDKRPPRIIKTIASKTQSIKKYSTDILGNLYEVKSKKHPQIIKKG

SEQ ID NO: 220 - protein, 1052 aa, Staphylococcus aureus
  REGION 1..1052: note = MISC_FEATURE - SaKKH Cas9 polypeptide sequence
KRNYILGLDIGITSVGYGIIDYETRDVIDAGVRLFKEANVENNEGRRSKRGARRLKRRRRHRIQRVKKLLFDYNLLTDHSELSGINPYEARVKGLSQKLSEEEFSAALLHLAKRRGVHNVNEVEEDTGNELSTKEQISRNSKALEEKYVAELQLERLKKDGEVRGSINRFKTSDYVKEAKQLLKVQKAYHQLDQSFIDTYIDLLETRRTYYEGPGEGSPFGWKDIKEWYEMLMGHCTYFPEELRSVKYAYNADLYNALNDLNNLVITRDENEKLEYYEKFQIIENVFKQKKKPTLKQIAKEILVNEEDIKGYRVTSTGKPEFTNLKVYHDIKDITARKEIIENAELLDQIAKILTIYQSSEDIQEELTNLNSELTQEEIEQISNLKGYTGTHNLSLKAINLILDELWHTNDNQIAIFNRLKLVPKKVDLSQQKEIPTTLVDDFILSPVVKRSFIQSIKVINAIIKKYGLPNDIIIELAREKNSKDAQKMINEMQKRNRQTNERIEEIIRTTGKENAKYLIEKIKLHDMQEGKCLYSLEAIPLEDLLNNPFNYEVDHIIPRSVSFDNSFNNKVLVKQEEASKKGNRTPFQYLSSSDSKISYETFKKHILNLAKGKGRISKTKKEYLLEERDINRFSVQKDFINRNLVDTRYATRGLMNLLRSYFRVNNLDVKVKSINGGFTSFLRRKWKFKKERNKGYKHHAEDALIIANADFIFKEWKKLDKAKKVMENQMFEEKQAESMPEIETEQEYKEIFITPHQIKHIKDFKDYKYSHRVDKKPNRKLINDTLYSTRKDDKGNTLIVNNLNGLYDKDNDKLKKLINKSPEKLLMYHHDPQTYQKLKLIMEQYGDEKNPLYKYYEETGNYLTKYSKKDNGPVIKKIKYYGNKLNAHLDITDDYPNSRNKVVKLSLKPYRFDVYLDNGVYKFVTVKNLDVIKKENYYEVNSKCYEEAKKLKKISNQAEFIASFYKNDLIKINGELYRVIGVNNDLLNRIEVNMIDITYREYLENMNDKRPPHIIKTIASKTQSIKKYSTDILGNLYEVKSKKHPQIIKKG

SEQ ID NO: 221 - protein, 707 aa, synthetic construct
  REGION 1..707: note = Casphi-1 polypeptide sequence
MADTPTLFTQFLRHHLPGQRFRKDILKQAGRILANKGEDATIAFLRGKSEESPPDFQPPVKCPIIACSRPLTEWPIYQASVAIQGYVYGQSLAEFEASDPGCSKDGLLGWFDKTGVCTDYFSVQGLNLIFQNARKRYIGVQTKVTNRNEKRHKKLKRINAKRIAEGLPELTSDEPESALDETGHLIDPPGLNTNIYCYQQVSPKPLALSEVNQLPTAYAGYSTSGDDPIQPMVTKDRLSISKGQPGYIPEHQRALLSQKKHRRMRGYGLKARALLVIVRIQDDWAVIDLRSLLRNAYWRRIVQTKEPSTITKLLKLVTGDPVLDATRMVATFTYKPGIVQVRSAKCLKNKQGSKLFSERYLNETVSVTSIDLGSNNLVAVATYRLVNGNTPELLQRFTLPSHLVKDFERYKQAHDTLEDSIQKTAVASLPQGQQTEIRMWSMYGFREAQERVCQELGLADGSIPWNVMTATSTILTDLFLARGGDPKKCMFTSEPKKKKNSKQVLYKIRDRAWAKMYRTLLSKETREAWNKALWGLKRGSPDYARLSKRKEELARRCVNYTISTAEKRAQCGRTIVALEDLNIGFFHGRGKQEPGWVGLFTRKKENRWLMQALHKAFLELAHHRGYHVIEVNPAYTSQTCPVCRHCDPDNRDQHNREAFHCIGCGFRGNADLDVATHNIAMVAITGESLKRARGSVASKTPQPLAAE

SEQ ID NO: 222 - protein, 757 aa, synthetic construct
  REGION 1..757: note = Casphi-2 polypeptide sequence
MPKPAVESEFSKVLKKHFPGERFRSSYMKRGGKILAAQGEEAVVAYLQGKSEEEPPNFQPPAKCHVVTKSRDFAEWPIMKASEAIQRYIYALSTTERAACKPGKSSESHAAWFAATGVSNHGYSHVQGLNLIFDHTLGRYDGVLKKVQLRNEKARARLESINASRADEGLPEIKAEEEEVATNETGHLLQPPGINPSFYVYQTISPQAYRPRDEIVLPPEYAGYVRDPNAPIPLGVVRNRCDIQKGCPGYIPEWQREAGTAISPKTGKAVTVPGLSPKKNKRMRRYWRSEKEKAQDALLVTVRIGTDWVVIDVRGLLRNARWRTIAPKDISLNALLDLFTGDPVIDVRRNIVTFTYTLDACGTYARKWTLKGKQTKATLDKLTATQTVALVAIDLGQTNPISAGISRVTQENGALQCEPLDRFTLPDDLLKDISAYRIAWDRNEEELRARSVEALPEAQQAEVRALDGVSKETARTQLCADFGLDPKRLPWDKMSSNTTFISEALLSNSVSRDQVFFTPAPKKGAKKKAPVEVMRKDRTWARAYKPRLSVEAQKLKNEALWALKRTSPEYLKLSRRKEELCRRSINYVIEKTRRRTQCQIVIPVIEDLNVRFFHGSGKRLPGWDNFFTAKKENRWFIQGLHKAFSDLRTHRSFYVFEVRPERTSITCPKCGHCEVGNRDGEAFQCLSCGKTCNADLDVATHNLTQVALTGKTMPKREEPRDAQGTAPARKTKKASKSKAPPAEREDQTPAQEPSQTS

SEQ ID NO: 223 - protein, 766 aa, synthetic construct
  REGION 1..766: note = Casphi-3 polypeptide sequence
MEKEITELTKIRREFPNKKFSSTDMKKAGKLLKAEGPDAVRDFLNSCQEIIGDFKPPVKTNIVSISRPFEEWPVSMVGRAIQEYYFSLTKEELESVHPGTSSEDHKSFFNITGLSNYNYTSVQGLNLIFKNAKAIYDGTLVKANNKNKKLEKKFNEINHKRSLEGLPIITPDFEEPFDENGHLNNPPGINRNIYGYQGCAAKVFVPSKHKMVSLPKEYEGYNRDPNLSLAGFRNRLEIPEGEPGHVPWFQRMDIPEGQIGHVNKIQRFNFVHGKNSGKVKFSDKTGRVKRYHHSKYKDATKPYKFLEESKKVSALDSILAIITIGDDWVVFDIRGLYRNVFYRELAQKGLTAVQLLDLFTGDPVIDPKKGVVTFSYKEGVVPVFSQKIVPRFKSRDTLEKLTSQGPVALLSVDLGQNEPVAARVCSLKNINDKITLDNSCRISFLDDYKKQIKDYRDSLDELEIKIRLEAINSLETNQQVEIRDLDVFSADRAKANTVDMFDIDPNLISWDSMSDARVSTQISDLYLKNGGDESRVYFEINNKRIKRSDYNISQLVRPKLSDSTRKNLNDSIWKLKRTSEEYLKLSKRKLELSRAVVNYTIRQSKLLSGINDIVIILEDLDVKKKFNGRGIRDIGWDNFFSSRKENRWFIPAFHKAFSELSSNRGLCVIEVNPAWTSATCPDCGFCSKENRDGINFTCRKCGVSYHADIDVATLNIARVAVLGKPMSGPADRERLGDTKKPRVARSRKTMKRKDISNSTVEAMVTA

SEQ ID NO: 224 - protein, 765 aa, synthetic construct
  REGION 1..765: note = Casphi-4 polypeptide sequence
MYSLEMADLKSEPSLLAKLLRDRFPGKYWLPKYWKLAEKKRLTGGEEAACEYMADKQLDSPPPNFRPPARCVILAKSRPFEDWPVHRVASKAQSFVIGLSEQGFAALRAAPPSTADARRDWLRSHGASEDDLMALEAQLLETIMGNAISLHGGVLKKIDNANVKAAKRLSGRNEARLNKGLQELPPEQEGSAYGADGLLVNPPGLNLNIYCRKSCCPKPVKNTARFVGHYPGYLRDSDSILISGTMDRLTIIEGMPGHIPAWQREQGLVKPGGRRRRLSGSESNMRQKVDPSTGPRRSTRSGTVNRSNQRTGRNGDPLLVEIRMKEDWVLLDARGLLRNLRWRESKRGLSCDHEDLSLSGLLALFSGDPVIDPVRNEVVFLYGEGIIPVRSTKPVGTRQSKKLLERQASMGPLTLISCDLGQTNLIAGRASAISLTHGSLGVRSSVRIELDPEIIKSFERLRKDADRLETEILTAAKETLSDEQRGEVNSHEKDSPQTAKASLCRELGLHPPSLPWGQMGPSTTFIADMLISHGRDDDAFLSHGEFPTLEKRKKFDKRFCLESRPLLSSETRKALNESLWEVKRTSSEYARLSQRKKEMARRAVNFVVEISRRKTGLSNVIVNIEDLNVRIFHGGGKQAPGWDGFFRPKSENRWFIQAIHKAFSDLAAHHGIPVIESDPQRTSMTCPECGHCDSKNRNGVRFLCKGCGASMDADFDAACRNLERVALTGKPMPKPSTSCERLLSATTGKVCSDHSLSHDAIEKAS

SEQ ID NO: 225 - protein, 793 aa, synthetic construct
  REGION 1..793: note = Casphi-5 polypeptide sequence
MSSLPTPLELLKQKHADLFKGLQFSSKDNKMAGKVLKKDGEEAALAFLSERGVSRGELPNFRPPAKTLVVAQSRPFEEFPIYRVSEAIQLYVYSLSVKELETVPSGSSTKKEHQRFFQDSSVPDFGYTSVQGLNKIFGLARGIYLGVITRGENQLQKAKSKHEALNKKRRASGEAETEFDPTPYEYMTPERKLAKPPGVNHSIMCYVDISVDEFDFRNPDGIVLPSEYAGYCREINTAIEKGTVDRLGHLKGGPGYIPGHQRKESTTEGPKINFRKGRIRRSYTALYAKRDSRRVRQGKLALPSYRHHMMRLNSNAESAILAVIFFGKDWVVFDLRGLLRNVRWRNLFVDGSTPSTLLGMFGDPVIDPKRGVVAFCYKEQIVPVVSKSITKMVKAPELLNKLYLKSEDPLVLVAIDLGQTNPVGVGVYRVMNASLDYEVVTRFALESELLREIESYRQRTNAFEAQIRAETFDAMTSEEQEEITRVRAFSASKAKENVCHRFGMPVDAVDWATMGSNTIHIAKWVMRHGDPSLVEVLEYRKDNEIKLDKNGVPKKVKLTDKRIANLTSIRLRFSQETSKHYNDTMWELRRKHPVYQKLSKSKADFSRRVVNSIIRRVNHLVPRARIVFIIEDLKNLGKVFHGSGKRELGWDSYFEPKSENRWFIQVLHKAFSETGKHKGYYIIECWPNWTSCTCPKCSCCDSENRHGEVFRCLACGYTCNTDFGTAPDNLVKIATTGKGLPGPKKRCKGSSKGKNPKIARSSETGVSVTESGAPKVKKSSPTQTSQSSSQSAP

SEQ ID NO: 226 - protein, 441 aa, synthetic construct
  REGION 1..441: note = Casphi-6 polypeptide sequence
MNKIEKEKTPLAKLMNENFAGLRFPFAIIKQAGKKLLKEGELKTIEYMTGKGSIEPLPNFKPPVKCLIVAKRRDLKYFPICKASCEIQSYVYSLNYKDFMDYFSTPMTSQKQHEEFFKKSGLNIEYQNVAGLNLIFNNVKNTYNGVILKVKNRNEKLKKKAIKNNYEFEEIKTFNDDGCLINKPGINNVIYCFQSISPKILKNITHLPKEYNDYDCSVDRNIIQKYVSRLDIPESQPGHVPEWQRKLPEFNNTNNPRRRRKWYSNGRNISKGYSVDQVNQAKIEDSLLAQIKIGEDWIILDIRGLLRDLNRRELISYKNKLTIKDVLGFFSDYPIIDIKKNLVTFCYKEGVIQVVSQKSIGNKKSKQLLEKLIENKPIALVSIDLGQTNPVSVKISKLNKINNKISIESFTYRFLNEEILKEIEKYRKDYDKLELKLINEA

SEQ ID NO: 227 - protein, 772 aa, synthetic construct
  REGION 1..772: note = Casphi-7 polypeptide sequence
MSNTAVSTREHMSNKTTPPSPLSLLLRAHFPGLKFESQDYKIAGKKLRDGGPEAVISYLTGKGQAKLKDVKPPAKAFVIAQSRPFIEWDLVRVSRQIQEKIFGIPATKGRPKQDGLSETAFNEAVASLEVDGKSKLNEETRAAFYEVLGLDAPSLHAQAQNALIKSAISIREGVLKKVENRNEKNLSKTKRRKEAGEEATFVEEKAHDERGYLIHPPGVNQTIPGYQAVVIKSCPSDFIGLPSGCLAKESAEALTDYLPHDRMTIPKGQPGYVPEWQHPLLNRRKNRRRRDWYSASLNKPKATCSKRSGTPNRKNSRTDQIQSGRFKGAIPVLMRFQDEWVIIDIRGLLRNARYRKLLKEKSTIPDLLSLFTGDPSIDMRQGVCTFIYKAGQACSAKMVKTKNAPEILSELTKSGPVVLVSIDLGQTNPIAAKVSRVTQLSDGQLSHETLLRELLSNDSSDGKEIARYRVASDRLRDKLANLAVERLSPEHKSEILRAKNDTPALCKARVCAALGLNPEMIAWDKMTPYTEFLATAYLEKGGDRKVATLKPKNRPEMLRRDIKFKGTEGVRIEVSPEAAEAYREAQWDLQRTSPEYLRLSTWKQELTKRILNQLRHKAAKSSQCEVVVMAFEDLNIKMMHGNGKWADGGWDAFFIKKRENRWFMQAFHKSLTELGAHKGVPTIEVTPHRTSITCTKCGHCDKANRDGERFACQKCGFVAHADLEIATDNIERVALTGKPMPKPESERSGDAKKSVGARKAAFKPEEDAEAAE

SEQ ID NO: 228 - protein, 717 aa, synthetic construct
  REGION 1..717: note = Casphi-8 polypeptide sequence
MIKPTVSQFLTPGFKLIRNHSRTAGLKLKNEGEEACKKFVRENEIPKDECPNFQGGPAIANIIAKSREFTEWEIYQSSLAIQEVIFTLPKDKLPEPILKEEWRAQWLSEHGLDTVPYKEAAGLNLIIKNAVNTYKGVQVKVDNKNKNNLAKINRKNEIAKLNGEQEISFEEIKAFDDKGYLLQKPSPNKSIYCYQSVSPKPFITSKYHNVNLPEEYIGYYRKSNEPIVSPYQFDRLRIPIGEPGYVPKWQYTFLSKKENKRRKLSKRIKNVSPILGIICIKKDWCVFDMRGLLRTNHWKKYHKPTDSINDLFDYFTGDPVIDTKANVVRFRYKMENGIVNYKPVREKKGKELLENICDQNGSCKLATVDVGQNNPVAIGLFELKKVNGELTKTLISRHPTPIDFCNKITAYRERYDKLESSIKLDAIKQLTSEQKIEVDNYNNNFTPQNTKQIVCSKLNINPNDLPWDKMISGTHFISEKAQVSNKSEIYFTSTDKGKTKDVMKSDYKWFQDYKPKLSKEVRDALSDIEWRLRRESLEFNKLSKSREQDARQLANWISSMCDVIGIENLVKKNNFFGGSGKREPGWDNFYKPKKENRWWINAIHKALTELSQNKGKRVILLPAMRTSITCPKCKYCDSKNRNGEKFNCLKCGIELNADIDVATENLATVAITAQSMPKPTCERSGDAKKPVRARKAKAPEFHDKLAPSYTVVLREAV

SEQ ID NO: 229 - protein, 793 aa, synthetic construct
  REGION 1..793: note = Casphi-9 polypeptide sequence
MRSSREIGDKILMRQPAEKTAFQVFRQEVIGTQKLSGGDAKTAGRLYKQGKMEAAREWLLKGARDDVPPNFQPPAKCLVVAVSHPFEEWDISKTNHDVQAYIYAQPLQAEGHLNGLSEKWEDTSADQHKLWFEKTGVPDRGLPVQAINKIAKAAVNRAFGVVRKVENRNEKRRSRDNRIAEHNRENGLTEVVREAPEVATNADGFLLHPPGIDPSILSYASVSPVPYNSSKHSFVRLPEEYQAYNVEPDAPIPQFVVEDRFAIPPGQPGYVPEWQRLKCSTNKHRRMRQWSNQDYKPKAGRRAKPLEFQAHLTRERAKGALLVVMRIKEDWVVFDVRGLLRNVEWRKVLSEEAREKLTLKGLLDLFTGDPVIDTKRGIVTFLYKAEITKILSKRTVKTKNARDLLLRLTEPGEDGLRREVGLVAVDLGQTHPIAAAIYRIGRTSAGALESTVLHRQGLREDQKEKLKEYRKRHTALDSRLRKEAFETLSVEQQKEIVTVSGSGAQITKDKVCNYLGVDPSTLPWEKMGSYTHFISDDFLRRGGDPNIVHFDRQPKKGKVSKKSQRIKRSDSQWVGRMRPRLSQETAKARMEADWAAQNENEEYKRLARSKQELARWCVNTLLQNTRCITQCDEIVVVIEDLNVKSLHGKGAREPGWDNFFTPKTENRWFIQILHKTFSELPKHRGEHVIEGCPLRTSITCPACSYCDKNSRNGEKFVCVACGATFHADFEVATYNLVRLATTGMPMPKSLERQGGGEKAGGARKARKKAKQVEKIVVQANANVTMNGASLHSP

SEQ ID NO: 230 - protein, 812 aa, synthetic construct
  REGION 1..812: note = Casphi-10 polypeptide sequence
MDMLDTETNYATETPAQQQDYSPKPPKKAQRAPKGFSKKARPEKKPPKPITLFTQKHFSGVRFLKRVIRDASKILKLSESRTITFLEQAIERDGSAPPDVTPPVHNTIMAVTRPFEEWPEVILSKALQKHCYALTKKIKIKTWPKKGPGKKCLAAWSARTKIPLIPGQVQATNGLFDRIGSIYDGVEKKVTNRNANKKLEYDEAIKEGRNPAVPEYETAYNIDGTLINKPGYNPNLYITQSRTPRLITEADRPLVEKILWQMVEKKTQSRNQARRARLEKAAHLQGLPVPKFVPEKVDRSQKIEIRIIDPLDKIEPYMPQDRMAIKASQDGHVPYWQRPFLSKRRNRRVRAGWGKQVSSIQAWLTGALLVIVRLGNEAFLADIRGALRNAQWRKLLKPDATYQSLFNLFTGDPVVNTRTNHLTMAYREGVVNIVKSRSFKGRQTREHLLTLLGQGKTVAGVSFDLGQKHAAGLLAAHFGLGEDGNPVFTPIQACFLPQRYLDSLTNYRNRYDALTLDMRRQSLLALTPAQQQEFADAQRDPGGQAKRACCLKLNLNPDEIRWDLVSGISTMISDLYIERGGDPRDVHQQVETKPKGKRKSEIRILKIRDGKWAYDFRPKIADETRKAQREQLWKLQKASSEFERLSRYKINIARAIANWALQWGRELSGCDIVIPVLEDLNVGSKFFDGKGKWLLGWDNRFTPKKENRWFIKVLHKAVAELAPHRGVPVYEVMPHRTSMTCPACHYCHPTNREGDRFECQSCHVVKNTDRDVAPYNILRVAVEGKTLDRWQAEKKPQAEPDRPMILIDNQES

SEQ ID NO: 231 - protein, 84 aa, synthetic construct
  REGION 1..84: note = synthetic polypeptide sequence
MTNLSDIIEKETGKQLVIQESILMLPEEVEEVIGNKPESDILVHTAYDESTDENVMLLTSDAPEYKPWALVIQDSNGENKIKML

SEQ ID NO: 232 - protein, 1129 aa, Alicyclobacillus acidoterrestris
  REGION 1..1129: note = MISC_FEATURE - Cas12b/C2c1; sp|T0D7A2|C2C1_ALIAG CRISPR-associated endonuclease C2c1 OS = Alicyclobacillus acido-terrestris (strain ATCC 49025 /DSM 3922/ CIP 106132 / NCIMB 13137/GD3B) GN=c2c1 PE=1 SV=1; Cas12b/C2c1 polypeptide sequence
MAVKSIKVKLRLDDMPEIRAGLWKLHKEVNAGVRYYTEWLSLLRQENLYRRSPNGDGEQECDKTAEECKAELLERLRARQVENGHRGPAGSDDELLQLARQLYELLVPQAIGAKGDAQQIARKFLSPLADKDAVGGLGIAKAGNKPRWVRMREAGEPGWEEEKEKAETRKSADRTADVLRALADFGLKPLMRVYTDSEMSSVEWKPLRKGQAVRTWDRDMFQQAIERMMSWESWNQRVGQEYAKLVEQKNRFEQKNFVGQEHLVHLVNQLQQDMKEASPGLESKEQTAHYVTGRALRGSDKVFEKWGKLAPDAPFDLYDAEIKNVQRRNTRRFGSHDLFAKLAEPEYQALWREDASFLTRYAVYNSILRKLNHAKMFATFTLPDATAHPIWTRFDKLGGNLHQYTFLFNEFGERRHAIRFHKLLKVENGVAREVDDVTVPISMSEQLDNLLPRDPNEPIALYFRDYGAEQHFTGEFGGAKIQCRRDQLAHMHRRRGARDVYLNVSVRVQSQSEARGERRPPYAAVFRLVGDNHRAFVHFDKLSDYLAEHPDDGKLGSEGLLSGLRVMSVDLGLRTSASISVFRVARKDELKPNSKGRVPFFFPIKGNDNLVAVHERSQLLKLPGETESKDLRAIREERQRTLRQLRTQLAYLRLLVRCGSEDVGRRERSWAKLIEQPVDAANHMTPDWREAFENELQKLKSLHGICSDKEWMDAVYESVRRVWRHMGKQVRDWRKDVRSGERPKIRGYAKDVVGGNSIEQIEYLERQYKFLKSWSFFGKVSGQVIRAEKGSRFAITLREHIDHAKEDRLKKLADRIIMEALGYVYALDERGKGKWVAKYPPCQLILLEELSEYQFNNDRPPSENNQLMQWSHRGVFQELINQAQVHDLLVGTMYAAFSSRFDARTGAPGIRCRRVPARCTQEHNPEPFPWWLNKFVVEHTLDACPLRADDLIPTGEGEIFVSPFSAEEGDFHQIHADLNAAQNLQQRLWSDFDISQIRLRCDWGEVDGELVLIPRLTGKRTADSYSNKVFYTNTGVTYYERERGKKRRKVFAQEKLSEEEAELLVEADEAREKSVVLMRDPSGIINRGNWTRQKEFWSMVNQRIEGYLVKQIRSRVPLQDSACENTGDI

SEQ ID NO: 233 - protein, 1368 aa, Mus musculus
  REGION 1..1368: note = MISC_FEATURE - high fidelity Cas9 polypeptide sequence
MDKKYSIGLAIGTNSVGWAVITDEYKVPSKKFKVLGNTDRHSIKKNLIGALLFDSGETAEATRLKRTARRRYTRRKNRICYLQEIFSNEMAKVDDSFFHRLEESFLVEEDKKHERHPIFGNIVDEVAYHEKYPTIYHLRKKLVDSTDKADLRLIYLALAHMIKFRGHFLIEGDLNPDNSDVDKLFIQLVQTYNQLFEENPINASGVDAKAILSARLSKSRRLENLIAQLPGEKKNGLFGNLIALSLGLTPNFKSNFDLAEDAKLQLSKDTYDDDLDNLLAQIGDQYADLFLAAKNLSDAILLSDILRVNTEITKAPLSASMIKRYDEHHQDLTLLKALVRQQLPEKYKEIFFDQSKNGYAGYIDGGASQEEFYKFIKPILEKMDGTEELLVKLNREDLLRKQRTFDNGSIPHQIHLGELHAILRRQEDFYPFLKDNREKIEKILTFRIPYYVGPLARGNSRFAWMTRKSEETITPWNFEEVVDKGASAQSFIERMTAFDKNLPNEKVLPKHSLLYEYFTVYNELTKVKYVTEGMRKPAFLSGEQKKAIVDLLFKTNRKVTVKQLKEDYFKKIECFDSVEISGVEDRFNASLGTYHDLLKIIKDKDFLDNEENEDILEDIVLTLTLFEDREMIEERLKTYAHLFDDKVMKQLKRRRYTGWGALSRKLINGIRDKQSGKTILDFLKSDGFANRNFMALIHDDSLTFKEDIQKAQVSGQGDSLHEHIANLAGSPAIKKGILQTVKVVDELVKVMGRHKPENIVIEMARENQTTQKGQKNSRERMKRIEEGIKELGSQILKEHPVENTQLQNEKLYLYYLQNGRDMYVDQELDINRLSDYDVDHIVPQSFLKDDSIDNKVLTRSDKNRGKSDNVPSEEVVKKMKNYWRQLLNAKLITQRKFDNLTKAERGGLSELDKAGFIKRQLVETRAITKHVAQILDSRMNTKYDENDKLIREVKVITLKSKLVSDFRKDFQFYKVREINNYHHAHDAYLNAVVGTALIKKYPKLESEFVYGDYKVYDVRKMIAKSEQEIGKATAKYFFYSNIMNFFKTEITLANGEIRKRPLIETNGETGEIVWDKGRDFATVRKVLSMPQVNIVKKTEVQTGGFSKESILPKRNSDKLIARKKDWDPKKYGGFDSPTVAYSVLVVAKVEKGKSKKLKSVKELLGITIMERSSFEKNPIDFLEAKGYKEVKKDLIIKLPKYSLFELENGRKRMLASAGELQKGNELALPSKYVNFLYLASHYEKLKGSPEDNEQKQLFVEQHKHYLDEIIEQISEFSKRVILADANLDKVLSAYNKHRDKPIREQAENIIHLFTLTNLGAPAAFKYFDTTIDRKRYTSTKEVLDATLIHQSITGLYETRIDLSQLGGD

SEQ ID NO: 234 - protein, 1368 aa, Streptococcus pyogenes
  REGION 1..1368: note = MISC_FEATURE - PAM-binding SpEQR Cas9 polypeptide sequence
MDKKYSIGLAIGTNSVGWAVITDEYKVPSKKFKVLGNTDRHSIKKNLIGALLFDSGETAEATRLKRTARRRYTRRKNRICYLQEIFSNEMAKVDDSFFHRLEESVLVEEDKKHERHPIFGNIVDEVAYHEKYPTIYHLRKKLVDSTDKADLRLIYLALAHMIKFRGHFLIEGDLNPDNSDVDKLFIQLVQTYNQLFEENPINASGVDAKAILSARLSKSRRLENLIAQLPGEKKNGLFGNLIALSLGLTPNFKSNFDLAEDAKLQLSKDTYDDDLDNLLAQIGDQYADLFLAAKNLSDAILLSDILRVNTEITKAPLSASMIKRYDEHHQDLTLLKALVRQQLPEKYKEIFFDQSKNGYAGYIDGGASQEEFYKFIKPILEKMDGTEELLVKLNREDLLRKQRTFDNGSIPHQIHLGELHAILRRQEDFYPFLKDNREKIEKILTFRIPYYVGPLARGNSRFAWMTRKSEETITPWNFEEVVDKGASAQSFIERMTNFDKNLPNEKVLPKHSLLYEYFTVYNELTKVKYVTEGMRKPAFLSGEQKKAIVDLLFKTNRKVTVKQLKEDYFKKIECFDSVEISGVEDRFNASLGTYHDLLKIIKDKDFLDNEENEDILEDIVLTLTLFEDREMIEERLKTYAHLFDDKVMKQLKRRRYTGWGRLSRKLINGIRDKQSGKTILDFLKSDGFANRNFMQLIHDDSLTFKEDIQKAQVSGQGDSLHEHIANLAGSPAIKKGILQTVKVVDELVKVMGRHKPENIVIEMARENQTTQKGQKNSRERMKRIEEGIKELGSQILKEHPVENTQLQNEKLYLYYLQNGRDMYVDQELDINRLSDYDVDHIVPQSFLKDDSIDNKVLTRSDKNRGKSDNVPSEEVVKKMKNYWRQLLNAKLITQRKFDNLTKAERGGLSELDKAGFIKRQLVETRQITKHVAQILDSRMNTKYDENDKLIREVKVITLKSKLVSDFRKDFQFYKVREINNYHHAHDAYLNAVVGTALIKKYPKLESEFVYGDYKVYDVRKMIAKSEQEIGKATAKYFFYSNIMNFFKTEITLANGEIRKRPLIETNGETGEIVWDKGRDFATVRKVLSMPQVNIVKKTEVQTGGFSKESILPKRNSDKLIARKKDWDPKKYGGFESPTVAYSVLVVAKVEKGKSKKLKSVKELLGITIMERSSFEKNPIDFLEAKGYKEVKKDLIIKLPKYSLFELENGRKRMLASAGELQKGNELALPSKYVNFLYLASHYEKLKGSPEDNEQKQLFVEQHKHYLDEIIEQISEFSKRVILADANLDKVLSAYNKHRDKPIREQAENIIHLFTLTNLGAPAAFKYFDTTIDRKQYRSTKEVLDATLIHQSITGLYETRIDLSQLGGD

SEQ ID NO: 235 - protein, 1368 aa, Streptococcus pyogenes
  REGION 1..1368: note = MISC_FEATURE - PAM-binding SpVQR Cas9 polypeptide sequence
MDKKYSIGLAIGTNSVGWAVITDEYKVPSKKFKVLGNTDRHSIKKNLIGALLFDSGETAEATRLKRTARRRYTRRKNRICYLQEIFSNEMAKVDDSFFHRLEESFLVEEDKKHERHPIFGNIVDEVAYHEKYPTIYHLRKKLVDSTDKADLRLIYLALAHMIKFRGHFLIEGDLNPDNSDVDKLFIQLVQTYNQLFEENPINASGVDAKAILSARLSKSRRLENLIAQLPGEKKNGLFGNLIALSLGLTPNFKSNFDLAEDAKLQLSKDTYDDDLDNLLAQIGDQYADLFLAAKNLSDAILLSDILRVNTEITKAPLSASMIKRYDEHHQDLTLLKALVRQQLPEKYKEIFFDQSKNGYAGYIDGGASQEEFYKFIKPILEKMDGTEELLVKLNREDLLRKQRTFDNGSIPHQIHLGELHAILRRQEDFYPFLKDNREKIEKILTFRIPYYVGPLARGNSRFAWMTRKSEETITPWNFEEVVDKGASAQSFIERMTNFDKNLPNEKVLPKHSLLYEYFTVYNELTKVKYVTEGMRKPAFLSGEQKKAIVDLLFKTNRKVTVKQLKEDYFKKIECFDSVEISGVEDRFNASLGTYHDLLKIIKDKDFLDNEENEDILEDIVLTLTLFEDREMIEERLKTYAHLFDDKVMKQLKRRRYTGWGRLSRKLINGIRDKQSGKTILDFLKSDGFANRNFMQLIHDDSLTFKEDIQKAQVSGQGDSLHEHIANLAGSPAIKKGILQTVKVVDELVKVMGRHKPENIVIEMARENQTTQKGQKNSRERMKRIEEGIKELGSQILKEHPVENTQLQNEKLYLYYLQNGRDMYVDQELDINRLSDYDVDHIVPQSFLKDDSIDNKVLTRSDKNRGKSDNVPSEEVVKKMKNYWRQLLNAKLITQRKFDNLTKAERGGLSELDKAGFIKRQLVETRQITKHVAQILDSRMNTKYDENDKLIREVKVITLKSKLVSDFRKDFQFYKVREINNYHHAHDAYLNAVVGTALIKKYPKLESEFVYGDYKVYDVRKMIAKSEQEIGKATAKYFFYSNIMNFFKTEITLANGEIRKRPLIETNGETGEIVWDKGRDFATVRKVLSMPQVNIVKKTEVQTGGFSKESILPKRNSDKLIARKKDWDPKKYGGFVSPTVAYSVLVVAKVEKGKSKKLKSVKELLGITIMERSSFEKNPIDFLEAKGYKEVKKDLIIKLPKYSLFELENGRKRMLASAGELQKGNELALPSKYVNFLYLASHYEKLKGSPEDNEQKQLFVEQHKHYLDEIIEQISEFSKRVILADANLDKVLSAYNKHRDKPIREQAENIIHLFTLTNLGAPAAFKYFDTTIDRKQYRSTKEVLDATLIHQSITGLYETRIDLSQLGGD

SEQ ID NO: 236 - protein, 1368 aa, Streptococcus pyogenes
  REGION 1..1368: note = MISC_FEATURE - SpVQR Cas9 polypeptide sequence
MDKKYSIGLAIGTNSVGWAVITDEYKVPSKKFKVLGNTDRHSIKKNLIGALLFDSGETAEATRLKRTARRRYTRRKNRICYLQEIFSNEMAKVDDSFFHRLEESFLVEEDKKHERHPIFGNIVDEVAYHEKYPTIYHLRKKLVDSTDKADLRLIYLALAHMIKFRGHFLIEGDLNPDNSDVDKLFIQLVQTYNQLFEENPINASGVDAKAILSARLSKSRRLENLIAQLPGEKKNGLFGNLIALSLGLTPNFKSNFDLAEDAKLQLSKDTYDDDLDNLLAQIGDQYADLFLAAKNLSDAILLSDILRVNTEITKAPLSASMIKRYDEHHQDLTLLKALVRQQLPEKYKEIFFDQSKNGYAGYIDGGASQEEFYKFIKPILEKMDGTEELLVKLNREDLLRKQRTFDNGSIPHQIHLGELHAILRRQEDFYPFLKDNREKIEKILTFRIPYYVGPLARGNSRFAWMTRKSEETITPWNFEEVVDKGASAQSFIERMTNFDKNLPNEKVLPKHSLLYEYFTVYNELTKVKYVTEGMRKPAFLSGEQKKAIVDLLFKTNRKVTVKQLKEDYFKKIECFDSVEISGVEDRFNASLGTYHDLLKIIKDKDFLDNEENEDILEDIVLTLTLFEDREMIEERLKTYAHLFDDKVMKQLKRRRYTGWGRLSRKLINGIRDKQSGKTILDFLKSDGFANRNFMQLIHDDSLTFKEDIQKAQVSGQGDSLHEHIANLAGSPAIKKGILQTVKVVDELVKVMGRHKPENIVIEMARENQTTQKGQKNSRERMKRIEEGIKELGSQILKEHPVENTQLQNEKLYLYYLQNGRDMYVDQELDINRLSDYDVDHIVPQSFLKDDSIDNKVLTRSDKNRGKSDNVPSEEVVKKMKNYWRQLLNAKLITQRKFDNLTKAERGGLSELDKAGFIKRQLVETRQITKHVAQILDSRMNTKYDENDKLIREVKVITLKSKLVSDFRKDFQFYKVREINNYHHAHDAYLNAVVGTALIKKYPKLESEFVYGDYKVYDVRKMIAKSEQEIGKATAKYFFYSNIMNFFKTEITLANGEIRKRPLIETNGETGEIVWDKGRDFATVRKVLSMPQVNIVKKTEVQTGGFSKESILPKRNSDKLIARKKDWDPKKYGGFVSPTVAYSVLVVAKVEKGKSKKLKSVKELLGITIMERSSFEKNPIDFLEAKGYKEVKKDLIIKLPKYSLFELENGRKRMLASARELQKGNELALPSKYVNFLYLASHYEKLKGSPEDNEQKQLFVEQHKHYLDEIIEQISEFSKRVILADANLDKVLSAYNKHRDKPIREQAENIIHLFTLTNLGAPAAFKYFDTTIDRKEYRSTKEVLDATLIHQSITGLYETRIDLSQLGGD

SEQ ID NO: 237 - protein, 1359 aa, Streptococcus macacae
  REGION 1..1359: note = MISC_FEATURE - SpyMacCas9 polypeptide sequence
MDKKYSIGLDIGTNSVGWAVITDDYKVPSKKFKVLGNTDRHSIKKNLIGALLFGSGETAEATRLKRTARRRYTRRKNRICYLQEIFSNEMAKVDDSFFHRLEESFLVEEDKKHERHPIFGNIVDEVAYHEKYPTIYHLRKKLADSTDKADLRLIYLALAHMIKFRGHFLIEGDLNPDNSDVDKLFIQLVQIYNQLFEENPINASRVDAKAILSARLSKSRRLENLIAQLPGEKRNGLFGNLIALSLGLTPNFKSNFDLAEDAKLQLSKDTYDDDLDNLLAQIGDQYADLFLAAKNLSDAILLSDILRVNSEITKAPLSASMIKRYDEHHQDLTLLKALVRQQLPEKYKEIFFDQSKNGYAGYIDGGASQEEFYKFIKPILEKMDGTEELLVKLNREDLLRKQRTFDNGSIPHQIHLGELHAILRRQEDFYPFLKDNREKIEKILTFRIPYYVGPLARGNSRFAWMTRKSEETITPWNFEEVVDKGASAQSFIERMTNFDKNLPNEKVLPKHSLLYEYFTVYNELTKVKYVTEGMRKPAFLSGEQKKAIVDLLFKTNRKVTVKQLKEDYFKKIECFDSVEISGVEDRFNASLGAYHDLLKIIKDKDFLDNEENEDILEDIVLTLTLFEDRGMIEERLKTYAHLFDDKVMKQLKRRRYTGWGRLSRKLINGIRDKQSGKTILDFLKSDGFANRNFMQLIHDDSLTFKEDIQKAQVSGQGHSLHEQIANLAGSPAIKKGILQTVKIVDELVKVMGHKPENIVIEMARENQTTQKGQKNSRERMKRIEEGIKELGSQILKEHPVENTQLQNEKLYLYYLQNGRDMYVDQELDINRLSDYDVDHIVPQSFIKDDSIDNKVLTRSDKNRGKSDNVPSEEVVKKMKNYWRQLLNAKLITQRKFDNLTKAERGGLSELDKAGFIKRQLVETRQITKHVAQILDSRMNTKYDENDKLIREVKVITLKSKLVSDFRKDFQFYKVREINNYHHAHDAYLNAVVGTALIKKYPKLESEFVYGDYKVYDVRKMIAKSEQEIGKATAKYFFYSNIMNFFKTEITLANGEIRKRPLIETNGETGEIVWDKGRDFATVRKVLSMPQVNIVKKTEIQTVGQNGGLFDDNPKSPLEVTPSKLVPLKKELNPKKYGGYQKPTTAYPVLLITDTKQLIPISVMNKKQFEQNPVKFLRDRGYQQVGKNDFIKLPKYTLVDIGDGIKRLWASSKEIHKGNQLVVSKKSQILLYHAHHLDSDLSNDYLQNHNQQFDVLFNEIISFSKKCKLGKEHIQKIENVYSNKKNSASIEELAESFIKLLGFTQLGATSPFNFLGVKLNQKQYKGKKDYILPCTEGTLIRQSITGLYETRVDLSKIGED

SEQ ID NO: 238 - protein, 1410 aa, synthetic construct
  REGION 1..1410: note = CP5 polypeptide sequence
  REGION 1..341: note = MISC_FEATURE - Sequence derived from Cas9
  REGION 342..362: note = MISC_FEATURE - Linker sequence
  REGION 363..1388: note = MISC_FEATURE - Sequence derived from Cas9
  REGION 1389..1410: note = MISC_FEATURE - Bipartite nuclear localization sequence
EIGKATAKYFFYSNIMNFFKTEITLANGEIRKRPLIETNGETGEIVWDKGRDFATVRKVLSMPQVNIVKKTEVQTGGFSKESILPKRNSDKLIARKKDWDPKKYGGFMQPTVAYSVLVVAKVEKGKSKKLKSVKELLGITIMERSSFEKNPIDFLEAKGYKEVKKDLIIKLPKYSLFELENGRKRMLASAKFLQKGNELALPSKYVNFLYLASHYEKLKGSPEDNEQKQLFVEQHKHYLDEIIEQISEFSKRVILADANLDKVLSAYNKHRDKPIREQAENIIHLFTLTNLGAPRAFKYFDTTIARKEYRSTKEVLDATLIHQSITGLYETRIDLSQLGGDGGSGGSGGSGGSGGSGGSGGMDKKYSIGLAIGTNSVGWAVITDEYKVPSKKFKVLGNTDRHSIKKNLIGALLFDSGETAEATRLKRTARRRYTRRKNRICYLQEIFSNEMAKVDDSFFHRLEESFLVEEDKKHERHPIFGNIVDEVAYHEKYPTIYHLRKKLVDSTDKADLRLIYLALAHMIKFRGHFLIEGDLNPDNSDVDKLFIQLVQTYNQLFEENPINASGVDAKAILSARLSKSRRLENLIAQLPGEKKNGLFGNLIALSLGLTPNFKSNFDLAEDAKLQLSKDTYDDDLDNLLAQIGDQYADLFLAAKNLSDAILLSDILRVNTEITKAPLSASMIKRYDEHHQDLTLLKALVRQQLPEKYKEIFFDQSKNGYAGYIDGGASQEEFYKFIKPILEKMDGTEELLVKLNREDLLRKQRTFDNGSIPHQIHLGELHAILRRQEDFYPFLKDNREKIEKILTFRIPYYVGPLARGNSRFAWMTRKSEETITPWNFEEVVDKGASAQSFIERMTNFDKNLPNEKVLPKHSLLYEYFTVYNELTKVKYVTEGMRKPAFLSGEQKKAIVDLLFKTNRKVTVKQLKEDYFKKIECFDSVEISGVEDRFNASLGTYHDLLKIIKDKDFLDNEENEDILEDIVLTLTLFEDREMIEERLKTYAHLFDDKVMKQLKRRRYTGWGRLSRKLINGIRDKQSGKTILDFLKSDGFANRNFMQLIHDDSLTFKEDIQKAQVSGQGDSLHEHIANLAGSPAIKKGILQTVKVVDELVKVMGRHKPENIVIEMARENQTTQKGQKNSRERMKRIEEGIKELGSQILKEHPVENTQLQNEKLYLYYLQNGRDMYVDQELDINRLSDYDVDHIVPQSFLKDDSIDNKVLTRSDKNRGKSDNVPSEEVVKKMKNYWRQLLNAKLITQRKFDNLTKAERGGLSELDKAGFIKRQLVETRQITKHVAQILDSRMNTKYDENDKLIREVKVITLKSKLVSDFRKDFQFYKVREINNYHHAHDAYLNAVVGTALIKKYPKLESEFVYGDYKVYDVRKMIAKSEQEGADKRTADGSEFESPKKKRKV

SEQ ID NO: 239 - protein, 1302 aa, synthetic construct
  REGION 1..1302: note = Cas12c1 polypeptide sequence
MQTKKTHLHLISAKASRKYRRTIACLSDTAKKDLERRKQSGAADPAQELSCLKTIKFKLEVPEGSKLPSFDRISQIYNALETIEKGSLSYLLFALILSGFRIFPNSSAAKTFASSSCYKNDQFASQIKEIFGEMVKNFIPSELESILKKGRRKNNKDWTEENIKRVLNSEFGRKNSEGSSALFDSFLSKFSQELFRKFDSWNEVNKKYLEAAELLDSMLASYGPFDSVCKMIGDSDSRNSLPDKSTIAFTNNAEITVDIESSVMPYMAIAALLREYRQSKSKAAPVAYVQSHLTTTNGNGLSWFFKFGLDLIRKAPVSSKQSTSDGSKSLQELFSVPDDKLDGLKFIKEACEALPEASLLCGEKGELLGYQDFRTSFAGHIDSWVANYVNRLFELIELVNQLPESIKLPSILTQKNHNLVASLGLQEAEVSHSLELFEGLVKNVRQTLKKLAGIDISSSPNEQDIKEFYAFSDVLNRLGSIRNQIENAVQTAKKDKIDLESAIEWKEWKKLKKLPKLNGLGGGVPKQQELLDKALESVKQIRHYQRIDFERVIQWAVNEHCLETVPKFLVDAEKKKINKESSTDFAAKENAVRFLLEGIGAAARGKTDSVSKAAYNWFVVNNFLAKKDLNRYFINCQGCIYKPPYSKRRSLAFALRSDNKDTIEVVWEKFETFYKEISKEIEKFNIFSQEFQTFLHLENLRMKLLLRRIQKPIPAEIAFFSLPQEYYDSLPPNVAFLALNQEITPSEYITQFNLYSSFLNGNLILLRRSRSYLRAKFSWVGNSKLIYAAKEARLWKIPNAYWKSDEWKMILDSNVLVFDKAGNVLPAPTLKKVCEREGDLRLFYPLLRQLPHDWCYRNPFVKSVGREKNVIEVNKEGEPKVASALPGSLFRLIGPAPFKSLLDDCFFNPLDKDLRECMLIVDQEISQKVEAQKVEASLESCTYSIAVPIRYHLEEPKVSNQFENVLAIDQGEAGLAYAVFSLKSIGEAETKPIAVGTIRIPSIRRLIHSVSTYRKKKQRLQNFKQNYDSTAFIMRENVTGDVCAKIVGLMKEFNAFPVLEYDVKNLESGSRQLSAVYKAVNSHFLYFKEPGRDALRKQLWYGGDSWTIDGIEIVTRERKEDGKEGVEKIVPLKVFPGRSVSARFTSKTCSCCGRNVFDWLFTEKKAKTNKKFNVNSKGELTTADGVIQLFEADRSKGPKFYARRKERTPLTKPIAKGSYSLEEIERRVRTNLRRAPKSKQSRDTSQSQYFCVYKDCALHFSGMQADENAAINIGRRFLTALRKNRRSDFPSNVKISDRLLDN

SEQ ID NO: 240 - protein, 1218 aa, synthetic construct
  REGION 1..1218: note = Cas12c2 polypeptide sequence
MTKHSIPLHAFRNSGADARKWKGRIALLAKRGKETMRTLQFPLEMSEPEAAAINTTPFAVAYNAIEGTGKGTLFDYWAKLHLAGFRFFPSGGAATIFRQQAVFEDASWNAAFCQQSGKDWPWLVPSKLYERFTKAPREVAKKDGSKKSIEFTQENVANESHVSLVGASITDKTPEDQKEFFLKMAGALAEKFDSWKSANEDRIVAMKVIDEFLKSEGLHLPSLENIAVKCSVETKPDNATVAWHDAPMSGVQNLAIGVFATCASRIDNIYDLNGGKLSKLIQESATTPNVTALSWLFGKGLEYFRTTDIDTIMQDFNIPASAKESIKPLVESAQAIPTMTVLGKKNYAPFRPNFGGKIDSWIANYASRLMLLNDILEQIEPGFELPQALLDNETLMSGIDMTGDELKELIEAVYAWVDAAKQGLATLLGRGGNVDDAVQTFEQFSAMMDTLNGTLNTISARYVRAVEMAGKDEARLEKLIECKFDIPKWCKSVPKLVGISGGLPKVEEEIKVMNAAFKDVRARMFVRFEEIAAYVASKGAGMDVYDALEKRELEQIKKLKSAVPERAHIQAYRAVLHRIGRAVQNCSEKTKQLFSSKVIEMGVFKNPSHLNNFIFNQKGAIYRSPFDRSRHAPYQLHADKLLKNDWLELLAEISATLMASESTEQMEDALRLERTRLQLQLSGLPDWEYPASLAKPDIEVEIQTALKMQLAKDTVTSDVLQRAFNLYSSVLSGLTFKLLRRSFSLKMRFSVADTTQLIYVPKVCDWAIPKQYLQAEGEIGIAARVVTESSPAKMVTEVEMKEPKALGHFMQQAPHDWYFDASLGGTQVAGRIVEKGKEVGKERKLVGYRMRGNSAYKTVLDKSLVGNTELSQCSMIIEIPYTQTVDADFRAQVQAGLPKVSINLPVKETITASNKDEQMLFDRFVAIDLGERGLGYAVFDAKTLELQESGHRPIKAITNLLNRTHHYEQRPNQRQKFQAKFNVNLSELRENTVGDVCHQINRICAYYNAFPVLEYMVPDRLDKQLKSVYESVTNRYIWSSTDAHKSARVQFWLGGETWEHPYLKSAKDKKPLVLSPGRGASGKGTSQTCSCCGRNPFDLIKDMKPRAKIAVVDGKAKLENSELKLFERNLESKDDMLARRHRNERAGMEQPLTPGNYTVDEIKALLRANLRRAPKNRRTKDTTVSEYHCVFSDCGKTMHADENAAVNIGGKFIADIEK

SEQ ID NO: 241 - protein, 1252 aa, Oleiphilus sp.
  REGION 1..1252: note = MISC_FEATURE - OspCas12c polypeptide sequence
MTKLRHRQKKLTHDWAGSKKREVLGSNGKLQNPLLMPVKKGQVTEFRKAFSAYARATKGEMTDGRKNMFTHSFEPFKTKPSLHQCELADKAYQSLHSYLPGSLAHFLLSAHALGFRIFSKSGEATAFQASSKIEAYESKLASELACVDLSIQNLTISTLFNALTTSVRGKGEETSADPLIARFYTLLTGKPLSRDTQGPERDLAEVISRKIASSFGTWKEMTANPLQSLQFFEEELHALDANVSLSPAFDVLIKMNDLQGDLKNRTIVFDPDAPVFEYNAEDPADIIIKLTARYAKEAVIKNQNVGNYVKNAITTTNANGLGWLLNKGLSLLPVSTDDELLEFIGVERSHPSCHALIELIAQLEAPELFEKNVFSDTRSEVQGMIDSAVSNHIARLSSSRNSLSMDSEELERLIKSFQIHTPHCSLFIGAQSLSQQLESLPEALQSGVNSADILLGSTQYMLTNSLVEESIATYQRTLNRINYLSGVAGQINGAIKRKAIDGEKIHLPAAWSELISLPFIGQPVIDVESDLAHLKNQYQTLSNEFDTLISALQKNFDLNFNKALLNRTQHFEAMCRSTKKNALSKPEIVSYRDLLARLTSCLYRGSLVLRRAGIEVLKKHKIFESNSELREHVHERKHFVFVSPLDRKAKKLLRLTDSRPDLLHVIDEILQHDNLENKDRESLWLVRSGYLLAGLPDQLSSSFINLPIITQKGDRRLIDLIQYDQINRDAFVMLVTSAFKSNLSGLQYRANKQSFVVTRTLSPYLGSKLVYVPKDKDWLVPSQMFEGRFADILQSDYMVWKDAGRLCVIDTAKHLSNIKKSVFSSEEVLAFLRELPHRTFIQTEVRGLGVNVDGIAFNNGDIPSLKTFSNCVQVKVSRTNTSLVQTLNRWFEGGKVSPPSIQFERAYYKKDDQIHEDAAKRKIRFQMPATELVHASDDAGWTPSYLLGIDPGEYGMGLSLVSINNGEVLDSGFIHINSLINFASKKSNHQTKVVPRQQYKSPYANYLEQSKDSAAGDIAHILDRLIYKLNALPVFEALSGNSQSAADQVWTKVLSFYTWGDNDAQNSIRKQHWFGASHWDIKGMLRQPPTEKKPKPYIAFPGSQVSSYGNSQRCSCCGRNPIEQLREMAKDTSIKELKIRNSEIQLFDGTIKLFNPDPSTVIERRRHNLGPSRIPVADRTFKNISPSSLEFKELITIVSRSIRHSPEFIAKKRGIGSEYFCAYSDCNSSLNSEANAAANVAQKFQKQLFFEL

SEQ ID NO: 242 - protein, 767 aa, synthetic construct
  REGION 1..767: note = Cas12g1 polypeptide sequence
MAQASSTPAVSPRPRPRYREERTLVRKLLPRPGQSKQEFRENVKKLRKAFLQFNADVSGVCQWAIQFRPRYGKPAEPTETFWKFFLEPETSLPPNDSRSPEFRRLQAFEAAAGINGAAALDDPAFTNELRDSILAVASRPKTKEAQRLFSRLKDYQPAHRMILAKVAAEWIESRYRRAHQNWERNYEEWKKEKQEWEQNHPELTPEIREAFNQIFQQLEVKEKRVRICPAARLLQNKDNCQYAGKNKHSVLCNQFNEFKKNHLQGKAIKFFYKDAEKYLRCGLQSLKPNVQGPFREDWNKYLRYMNLKEETLRGKNGGRLPHCKNLGQECEFNPHTALCKQYQQQLSSRPDLVQHDELYRKWRREYWREPRKPVFRYPSVKRHSIAKIFGENYFQADFKNSVVGLRLDSMPAGQYLEFAFAPWPRNYRPQPGETEISSVHLHFVGTRPRIGFRFRVPHKRSRFDCTQEELDELRSRTFPRKAQDQKFLEAARKRLLETFPGNAEQELRLLAVDLGTDSARAAFFIGKTFQQAFPLKIVKIEKLYEQWPNQKQAGDRRDASSKQPRPGLSRDHVGRHLQKMRAQASEIAQKRQELTGTPAPETTTDQAAKKATLQPFDLRGLTVHTARMIRDWARLNARQIIQLAEENQVDLIVLESLRGFRPPGYENLDQEKKRRVAFFAHGRIRRKVTEKAVERGMRVVTVPYLASSKVCAECRKKQKDNKQWEKNKKRGLFKCEGCGSQAQVDENAARVLGRVFWGEIELPTAIP

SEQ ID NO: 243 - protein, 870 aa, synthetic construct
  REGION 1..870: note = Cas12h1 polypeptide sequence
MKVHEIPRSQLLKIKQYEGSFVEWYRDLQEDRKKFASLLFRWAAFGYAAREDDGATYISPSQALLERRLLLGDAEDVAIKFLDVLFKGGAPSSSCYSLFYEDFALRDKAKYSGAKREFIEGLATMPLDKIIERIRQDEQLSKIPAEEWLILGAEYSPEEIWEQVAPRIVNVDRSLGKQLRERLGIKCRRPHDAGYCKILMEVVARQLRSHNETYHEYLNQTHEMKTKVANNLTNEFDLVCEFAEVLEEKNYGLGWYVLWQGVKQALKEQKKPTKIQIAVDQLRQPKFAGLLTAKWRALKGAYDTWKLKKRLEKRKAFPYMPNWDNDYQIPVGLTGLGVFTLEVKRTEVVVDLKEHGKLFCSHSHYFGDLTAEKHPSRYHLKFRHKLKLRKRDSRVEPTIGPWIEAALREITIQKKPNGVFYLGLPYALSHGIDNFQIAKRFFSAAKPDKEVINGLPSEMVVGAADLNLSNIVAPVKARIGKGLEGPLHALDYGYGELIDGPKILTPDGPRCGELISLKRDIVEIKSAIKEFKACQREGLTMSEETTTWLSEVESPSDSPRCMIQSRIADTSRRLNSFKYQMNKEGYQDLAEALRLLDAMDSYNSLLESYQRMHLSPGEQSPKEAKFDTKRASFRDLLRRRVAHTIVEYFDDCDIVFFEDLDGPSDSDSRNNALVKLLSPRTLLLYIRQALEKRGIGMVEVAKDGTSQNNPISGHVGWRNKQNKSEIYFYEDKELLVMDADEVGAMNILCRGLNHSVCPYSFVTKAPEKKNDEKKEGDYGKRVKRFLKDRYGSSNVRFLVASMGFVTVTTKRPKDALVGKRLYYHGGELVTHDLHNRMKDEIKYLVEKEVLARRVSLSDSTIKSYKSFAHV

SEQ ID NO: 244 - protein, 1093 aa, synthetic construct
  REGION 1..1093: note = Cas12i1 polypeptide sequence
MSNKEKNASETRKAYTTKMIPRSHDRMKLLGNFMDYLMDGTPIFFELWNQFGGGIDRDIISGTANKDKISDDLLLAVNWFKVMPINSKPQGVSPSNLANLFQQYSGSEPDIQAQEYFASNFDTEKHQWKDMRVEYERLLAELQLSRSDMHHDLKLMYKEKCIGLSLSTAHYITSVMFGTGAKNNRQTKHQFYSKVIQLLEESTQINSVEQLASIILKAGDCDSYRKLRIRCSRKGATPSILKIVQDYELGTNHDDEVNVPSLIANLKEKLGRFEYECEWKCMEKIKAFLASKVGPYYLGSYSAMLENALSPIKGMTTKNCKFVLKQIDAKNDIKYENEPFGKIVEGFFDSPYFESDTNVKWVLHPHHIGESNIKTLWEDLNAIHSKYEEDIASLSEDKKEKRIKVYQGDVCQTINTYCEEVGKEAKTPLVQLLRYLYSRKDDIAVDKIIDGITFLSKKHKVEKQKINPVIQKYPSFNFGNNSKLLGKIISPKDKLKHNLKCNRNQVDNYIWIEIKVLNTKTMRWEKHHYALSSTRFLEEVYYPATSENPPDALAARFRTKTNGYEGKPALSAEQIEQIRSAPVGLRKVKKRQMRLEAARQQNLLPRYTWGKDFNINICKRGNNFEVTLATKVKKKKEKNYKVVLGYDANIVRKNTYAAIEAHANGDGVIDYNDLPVKPIESGFVTVESQVRDKSYDQLSYNGVKLLYCKPHVESRRSFLEKYRNGTMKDNRGNNIQIDFMKDFEAIADDETSLYYFNMKYCKLLQSSIRNHSSQAKEYREEIFELLRDGKLSVLKLSSLSNLSFVMFKVAKSLIGTYFGHLLKKPKNSKSDVKAPPITDEDKQKADPEMFALRLALEEKRLNKVKSKKEVIANKIVAKALELRDKYGPVLIKGENISDTTKKGKKSSTNSFLMDWLARGVANKVKEMVMMHQGLEFVEVNPNFTSHQDPFVHKNPENTFRARYSRCTPSELTEKNRKEILSFLSDKPSKRPTNAYYNEGAMAFLATYGLKKNDVLGVSLEKFKQIMANILHQRSEDQLLFPSRGGMFYLATYKLDADATSVNWNGKQFWVCNADLVAAYNVGLVDIQKDFKKK

SEQ ID NO: 245 - protein, 1054 aa, synthetic construct
  REGION 1..1054: note = Cas12i2 polypeptide sequence
MSSAIKSYKSVLRPNERKNQLLKSTIQCLEDGSAFFFKMLQGLFGGITPEIVRFSTEQEKQQQDIALWCAVNWFRPVSQDSLTHTIASDNLVEKFEEYYGGTASDAIKQYFSASIGESYYWNDCRQQYYDLCRELGVEVSDLTHDLEILCREKCLAVATESNQNNSIISVLFGTGEKEDRSVKLRITKKILEAISNLKEIPKNVAPIQEIILNVAKATKETFRQVYAGNLGAPSTLEKFIAKDGQKEFDLKKLQTDLKKVIRGKSKERDWCCQEELRSYVEQNTIQYDLWAWGEMFNKAHTALKIKSTRNYNFAKQRLEQFKEIQSLNNLLVVKKLNDFFDSEFFSGEETYTICVHHLGGKDLSKLYKAWEDDPADPENAIVVLCDDLKNNFKKEPIRNILRYIFTIRQECSAQDILAAAKYNQQLDRYKSQKANPSVLGNQGFTWTNAVILPEKAQRNDRPNSLDLRIWLYLKLRHPDGRWKKHHIPFYDTRFFQEIYAAGNSPVDTCQFRTPRFGYHLPKLTDQTAIRVNKKHVKAAKTEARIRLAIQQGTLPVSNLKITEISATINSKGQVRIPVKFDVGRQKGTLQIGDRFCGYDQNQTASHAYSLWEVVKEGQYHKELGCFVRFISSGDIVSITENRGNQFDQLSYEGLAYPQYADWRKKASKFVSLWQITKKNKKKEIVTVEAKEKFDAICKYQPRLYKFNKEYAYLLRDIVRGKSLVELQQIRQEIFRFIEQDCGVTRLGSLSLSTLETVKAVKGIIYSYFSTALNASKNNPISDEQRKEFDPELFALLEKLELIRTRKKKQKVERIANSLIQTCLENNIKFIRGEGDLSTTNNATKKKANSRSMDWLARGVFNKIRQLAPMHNITLFGCGSLYTSHQDPLVHRNPDKAMKCRWAAIPVKDIGDWVLRKLSQNLRAKNIGTGEYYHQGVKEFLSHYELQDLEEELLKWRSDRKSNIPCWVLQNRLAEKLGNKEAVVYIPVRGGRIYFATHKVATGAVSIVFDQKQVWVCNADHVAAANIALTVKGIGEQSSDEENPDGSRIKLQLTS

SEQ ID NO: 246 - protein, 4 aa, synthetic construct
  REGION 1..4: note = synthetic peptide sequence
GGGS

SEQ ID NO: 247 - protein, 5 aa, synthetic construct
  REGION 1..5: note = synthetic peptide sequence
GGGGS

SEQ ID NO: 248 - protein, 5 aa, synthetic construct
  REGION 1..5: note = synthetic peptide sequence
EAAAK

SEQ ID NO: 249 - protein, 16 aa, synthetic construct
  REGION 1..16: note = synthetic peptide sequence
SGSETPGTSESATPES

SEQ ID NO: 250 - protein, 6 aa, synthetic construct
  REGION 1..6: note = linker peptide sequence
GGSGGS

SEQ ID NO: 251 - protein, 20 aa, synthetic construct
  REGION 1..20: note = synthetic peptide sequence
GSSGSETPGTSESATPESSG

SEQ ID NO: 252 - DNA, 18 bp, synthetic construct
  misc_feature 1..18: note = synthetic oligonucleotide sequence
  source 1..18: mol_type = other DNA
ggaggctctggaggaagc

SEQ ID NO: 253 - DNA, 60 bp, synthetic construct
  misc_feature 1..60: note = synthetic oligonucleotide sequence
  source 1..60: mol_type = other DNA
ggctcttctggatctgaaacacctggcacaagcgagagcgccacccctgagagctctggc

SEQ ID NO: 254 - protein, 1129 aa, Alicyclobacillus acidiphilus
  REGION 1..1129: note = MISC_FEATURE - AacCas12b polypeptide sequence
MAVKSMKVKLRLDNMPEIRAGLWKLHTEVNAGVRYYTEWLSLLRQENLYRRSPNGDGEQECYKTAEECKAELLERLRARQVENGHCGPAGSDDELLQLARQLYELLVPQAIGAKGDAQQIARKFLSPLADKDAVGGLGIAKAGNKPRWVRMREAGEPGWEEEKAKAEARKSTDRTADVLRALADFGLKPLMRVYTDSDMSSVQWKPLRKGQAVRTWDRDMFQQAIERMMSWESWNQRVGEAYAKLVEQKSRFEQKNFVGQEHLVQLVNQLQQDMKEASHGLESKEQTAHYLTGRALRGSDKVFEKWEKLDPDAPFDLYDTEIKNVQRRNTRRFGSHDLFAKLAEPKYQALWREDASFLTRYAVYNSIVRKLNHAKMFATFTLPDATAHPIWTRFDKLGGNLHQYTFLFNEFGEGRHAIRFQKLLTVEDGVAKEVDDVTVPISMSAQLDDLLPRDPHELVALYFQDYGAEQHLAGEFGGAKIQYRRDQLNHLHARRGARDVYLNLSVRVQSQSEARGERRPPYAAVFRLVGDNHRAFVHFDKLSDYLAEHPDDGKLGSEGLLSGLRVMSVDLGLRTSASISVFRVARKDELKPNSEGRVPFCFPIEGNENLVAVHERSQLLKLPGETESKDLRAIREERQRTLRQLRTQLAYLRLLVRCGSEDVGRRERSWAKLIEQPMDANQMTPDWREAFEDELQKLKSLYGICGDREWTEAVYESVRRVWRHMGKQVRDWRKDVRSGERPKIRGYQKDVVGGNSIEQIEYLERQYKFLKSWSFFGKVSGQVIRAEKGSRFAITLREHIDHAKEDRLKKLADRIIMEALGYVYALDDERGKGKWVAKYPPCQLILLEELSEYQFNNDRPPSENNQLMQWSHRGVFQELLNQAQVHDLLVGTMYAAFSSRFDARTGAPGIRCRRVPARCAREQNPEPFPWWLNKFVAEHKLDGCPLRADDLIPTGEGEFFVSPFSAEEGDFHQIHADLNAAQNLQRRLWSDFDISQIRLRCDWGEVDGEPVLIPRTTGKRTADSYGNKVFYTKTGVTYYERERGKKRRKVFAQEELSEEEAELLVEADEAREKSVVLMRDPSGIINRGDWTRQKEFWSMVNQRIEGYLVKQIRSRVRLQESACENTGDI

SEQ ID NO: 255 - protein, 1140 aa, Bacillus hisashii
  REGION 1..1140: note = MISC_FEATURE - BhCas12b polypeptide sequence
MAPKKKRKVGIHGVPAAATRSFILKIEPNEEVKKGLWKTHEVLNHGIAYYMNILKLIRQEAIYEHHEQDPKNPKKVSKAEIQAELWDFVLKMQKCNSFTHEVDKDEVFNILRELYEELVPSSVEKKGEANQLSNKFLYPLVDPNSQSGKGTASSGRKPRWYNLKIAGDPSWEEEKKKWEEDKKKDPLAKILGKLAEYGLIPLFIPYTDSNEPIVKEIKWMEKSRNQSVRRLDKDMFIQALERFLSWESWNLKVKEEYEKVEKEYKTLEERIKEDIQALKALEQYEKERQEQLLRDTLNTNEYRLSKRGLRGWREIIQKWLKMDENEPSEKYLEVFKDYQRKHPREAGDYSVYEFLSKKENHFIWRNHPEYPYLYATFCEIDKKKKDAKQQATFTLADPINHPLWVRFEERSGSNLNKYRILTEQLHTEKLKKKLTVQLDRLIYPTESGGWEEKGKVDIVLLPSRQFYNQIFLDIEEKGKHAFTYKDESIKFPLKGTLGGARVQFDRDHLRRYPHKVESGNVGRIYFNMTVNIEPTESPVSKSLKIHRDDFPKVVNFKPKELTEWIKDSKGKKLKSGIESLEIGLRVMSIDLGQRQAAAASIFEVVDQKPDIEGKLFFPIKGTELYAVHRASFNIKLPGETLVKSREVLRKAREDNLKLMNQKLNFLRNVLHFQQFEDITEREKRVTKWISRQENSDVPLVYQDELIQIRELMYKPYKDWVAFLKQLHKRLEVEIGKEVKHWRKSLSDGRKGLYGISLKNIDEIDRTRKFLLRWSLRPTEPGEVRRLEPGQRFAIDQLNHLNALKEDRLKKMANTIIMHALGYCYDVRKKKWQAKNPACQIILFEDLSNYNPYEERSRFENSKLMKWSRREIPRQVALQGEIYGLQVGEVGAQFSSRFHAKTGSPGIRCSVVTKEKLQDNRFFKNLQREGRLTLDKIAVLKEGDLYPDKGGEKFISLSKDRKCVTTHADINAAQNLQKRFWTRTHGFYKVYCKAYQVDGQTVYIPESKDQKQKIIEEFGEGYFILKDGVYEWVNAGKLKIKKGSSKQSSSELVDSDILKDSFDLASELKGEKLMLYRDPSGNVFPSDKWMAAGVFFGKLERILISKLTNQYSISTIEDDSSKQSMKRPAATKKAGQAKKKK

SEQ ID NO: 256 - protein, 1108 aa, Bacillus thermoamylovorans
  REGION 1..1108: note = MISC_FEATURE - BTCas12b polypeptide sequence
MATRSFILKIEPNEEVKKGLWKTHEVLNHGIAYYMNILKLIRQEAIYEHHEQDPKNPKKVSKAEIQAELWDFVLKMQKCNSFTHEVDKDVVFNILRELYEELVPSSVEKKGEANQLSNKFLYPLVDPNSQSGKGTASSGRKPRWYNLKIAGDPSWEEEKKKWEEDKKKDPLAKILGKLAEYGLIPLFIPFTDSNEPIVKEIKWMEKSRNQSVRRLDKDMFIQALERFLSWESWNLKVKEEYEKVEKEHKTLEERIKEDIQAFKSLEQYEKERQEQLLRDTLNTNEYRLSKRGLRGWREIIQKWLKMDENEPSEKYLEVFKDYQRKHPREAGDYSVYEFLSKKENHFIWRNHPEYPYLYATFCEIDKKKKDAKQQATFTLADPINHPLWVRFEERSGSNLNKYRILTEQLHTEKLKKKLTVQLDRLIYPTESGGWEEKGKVDIVLLPSRQFYNQIFLDIEEKGKHAFTYKDESIKFPLKGTLGGARVQFDRDHLRRYPHKVESGNVGRIYFNMTVNIEPTESPVSKSLKIHRDDFPKFVNFKPKELTEWIKDSKGKKLKSGIESLEIGLRVMSIDLGQRQAAAASIFEVVDQKPDIEGKLFFPIKGTELYAVHRASFNIKLPGETLVKSREVLRKAREDNLKLMNQKLNFLRNVLHFQQFEDITEREKRVTKWISRQENSDVPLVYQDELIQIRELMYKPYKDWVAFLKQLHKRLEVEIGKEVKHWRKSLSDGRKGLYGISLKNIDEIDRTRKFLLRWSLRPTEPGEVRRLEPGQRFAIDQLNHLNALKEDRLKKMANTIIMHALGYCYDVRKKKWQAKNPACQIILFEDLSNYNPYEERSRFENSKLMKWSRREIPRQVALQGEIYGLQVGEVGAQFSSRFHAKTGSPGIRCSVVTKEKLQDNRFFKNLQREGRLTLDKIAVLKEGDLYPDKGGEKFISLSKDRKLVTTHADINAAQNLQKRFWTRTHGFYKVYCKAYQVDGQTVYIPESKDQKQKIIEEFGEGYFILKDGVYEWGNAGKLKIKKGSSKQSSSELVDSDILKDSFDLASELKGEKLMLYRDPSGNVFPSDKWMAAGVFFGKLERILISKLTNQYSISTIEDDSSKQSM

SEQ ID NO: 257 - protein, 1112 aa, Bacillus sp.
  REGION 1..1112: note = MISC_FEATURE - BvCas12b (Bacillus sp. V3-13) polypeptide sequence
MAIRSIKLKMKTNSGTDSIYLRKALWRTHQLINEGIAYYMNLLTLYRQEAIGDKTKEAYQAELINIIRNQQRNNGSSEEHGSDQEILALLRQLYELIIPSSIGESGDANQLGNKFLYPLVDPNSQSGKGTSNAGRKPRWKRLKEEGNPDWELEKKKDEERKAKDPTVKIFDNLNKYGLLPLFPLFTNIQKDIEWLPLGKRQSVRKWDKDMFIQAIERLLSWESWNRRVADEYKQLKEKTESYYKEHLTGGEEWIEKIRKFEKERNMELEKNAFAPNDGYFITSRQIRGWDRVYEKWSKLPESASPEELWKVVAEQQNKMSEGFGDPKVFSFLANRENRDIWRGHSERIYHIAAYNGLQKKLSRTKEQATFTLPDAIEHPLWIRYESPGGTNLNLFKLEEKQKKNYYVTLSKIIWPSEEKWIEKENIEIPLAPSIQFNRQIKLKQHVKGKQEISFSDYSSRISLDGVLGGSRIQFNRKYIKNHKELLGEGDIGPVFFNLVVDVAPLQETRNGRLQSPIGKALKVISSDFSKVIDYKPKELMDWMNTGSASNSFGVASLLEGMRVMSIDMGQRTSASVSIFEVVKELPKDQEQKLFYSINDTELFAIHKRSFLLNLPGEVVTKNNKQQRQERRKKRQFVRSQIRMLANVLRLETKKTPDERKKAIHKLMEIVQSYDSWTASQKEVWEKELNLLTNMAAFNDEIWKESLVELHHRIEPYVGQIVSKWRKGLSEGRKNLAGISMWNIDELEDTRRLLISWSKRSRTPGEANRIETDEPFGSSLLQHIQNVKDDRLKQMANLIIMTALGFKYDKEEKDRYKRWKETYPACQIILFENLNRYLFNLDRSRRENSRLMKWAHRSIPRTVSMQGEMFGLQVGDVRSEYSSRFHAKTGAPGIRCHALTEEDLKAGSNTLKRLIEDGFINESELAYLKKGDIIPSQGGELFVTLSKRYKKDSDNNELTVIHADINAAQNLQKRFWQQNSEVYRVPCQLARMGEDKLYIPKSQTETIKKYFGKGSFVKNNTEQEVYKWEKSEKMKIKTDTTFDLQDLDGFEDISKTIELAQEQQKKYLTMFRDPSGYFFNNETWRPQKEYWSIVNNIIKSCLKKKILSNKVEL

SEQ ID NO: 258 - DNA, 47 bp, synthetic construct
  misc_feature 1..47: note = 5'UTR oligonucleotide sequence
  source 1..47: mol_type = other DNA
gggaaataagagagaaaagaagagtaagaagaaatataagagccacc

SEQ ID NO: 259 - DNA, 101 bp, synthetic construct
  misc_feature 1..101: note = 3'UTR (TriLink standard UTR)polynucleotide sequence
  source 1..101: mol_type = other DNA
gctggagcctcggtggccatgcttcttgccccttgggcctccccccagcccctcctccccttcctgcacccgtacccccgtggtctttgaataaagtctga

SEQ ID NO: 260 - DNA, 3420 bp, Bacillus hisashii
  misc_feature 1..3420: note = bhCas12b (V4) polynucleotide sequence
  source 1..3420: mol_type = genomic DNA
atggccccaaagaagaagcggaaggtcggtatccacggagtcccagcagccgccaccagatccttcatcctgaagatcgagcccaacgaggaagtgaagaaaggcctctggaaaacccacgaggtgctgaaccacggaatcgcctactacatgaatatcctgaagctgatccggcaagaggccatctacgagcaccacgagcaggaccccaagaatcccaagaaggtgtccaaggccgagatccaggccgagctgtgggatttcgtgctgaagatgcagaagtgcaacagcttcacacacgaggtggacaaggacgaggtgttcaacatcctgagagagctgtacgaggaactggtgcccagcagcgtggaaaagaagggcgaagccaaccagctgagcaacaagtttctgtaccctctggtggaccccaacagccagtctggaaagggaacagccagcagcggcagaaagcccagatggtacaacctgaagattgccggcgatccctcctgggaagaagagaagaagaagtgggaagaagataagaaaaaggacccgctggccaagatcctgggcaagctggctgagtacggactgatccctctgttcatcccctacaccgacagcaacgagcccatcgtgaaagaaatcaagtggatggaaaagtcccggaaccagagcgtgcggcggctggataaggacatgttcattcaggccctggaacggttcctgagctgggagagctggaacctgaaagtgaaagaggaatacgagaaggtcgagaaagagtacaagaccctggaagagaggatcaaagaggacatccaggctctgaaggctctggaacagtatgagaaagagcggcaagaacagctgctgcgggacaccctgaacaccaacgagtaccggctgagcaagagaggccttagaggctggcgggaaatcatccagaaatggctgaaaatggacgagaacgagccctccgagaagtacctggaagtgttcaaggactaccagcggaagcaccctagagaggccggcgattacagcgtgtacgagttcctgtccaagaaagagaaccacttcatctggcggaatcaccctgagtacccctacctgtacgccaccttctgcgagatcgacaagaaaaagaaggacgccaagcagcaggccaccttcacactggccgatcctatcaatcaccctctgtgggtccgattcgaggaaagaagcggcagcaacctgaacaagtacagaatcctgaccgagcagctgcacaccgagaagctgaagaaaaagctgacagtgcagctggaccggctgatctaccctacagaatctggcggctgggaagagaagggcaaagtggacattgtgctgctgcccagccggcagttctacaaccagatcttcctggacatcgaggaaaagggcaagcacgccttcacctacaaggatgagagcatcaagttccctctgaagggcacactcggcggagccagagtgcagttcgacagagatcacctgagaagataccctcacaaggtggaaagcggcaacgtgggcagaatctacttcaacatgaccgtgaacatcgagcctacagagtccccagtgtccaagtctctgaagatccaccgggacgacttccccaaggtggtcaacttcaagcccaaagaactgaccgagtggatcaaggacagcaagggcaagaaactgaagtccggcatcgagtccctggaaatcggcctgagagtgatgagcatcgacctgggacagagacaggccgctgccgcctctattttcgaggtggtggatcagaagcccgacatcgaaggcaagctgtttttcccaatcaagggcaccgagctgtatgccgtgcacagagccagcttcaacatcaagctgcccggcgagacactggtcaagagcagagaagtgctgcggaaggccagagaggacaatctgaaactgatgaaccagaagctcaacttcctgcggaacgtgctgcacttccagcagttcgaggacatcaccgagagagagaagcgggtcaccaagtggatcagcagacaagagaacagcgacgtgcccctggtgtaccaggatgagctgatccagatccgcgagctgatgtacaagccttacaaggactgggtcgccttcctgaagcagctccacaagagactggaagtcgagatcggcaaagaagtgaagcactggcggaagtccctgagcgacggaagaaagggcctgtacggcatctccctgaagaacatcgacgagatcgatcggacccggaagttcctgctgagatggtccctgaggcctaccgaacctggcgaagtgcgtagactggaacccggccagagattcgccatcgaccagctgaatcacctgaacgccctgaaagaagatcggctgaagaagatggccaacaccatcatcatgcacgccctgggctactgctacgacgtgcggaagaagaaatggcaggctaagaaccccgcctgccagatcatcctgttcgaggatctgagcaactacaacccctacgaggaaaggtcccgcttcgagaacagcaagctcatgaagtggtccagacgcgagatccccagacaggttgcactgcagggcgagatctatggcctgcaagtgggagaagtgggcgctcagttcagcagcagattccacgccaagacaggcagccctggcatcagatgtagcgtcgtgaccaaagagaagctgcaggacaatcggttcttcaagaatctgcagagagagggcagactgaccctggacaaaatcgccgtgctgaaagagggcgatctgtacccagacaaaggcggcgagaagttcatcagcctgagcaaggatcggaagtgcgtgaccacacacgccgacatcaacgccgctcagaacctgcagaagcggttctggacaagaacccacggcttctacaaggtgtactgcaaggcctaccaggtggacggccagaccgtgtacatccctgagagcaaggaccagaagcagaagatcatcgaagagttcggcgagggctacttcattctgaaggacggggtgtacgaatgggtcaacgccggcaagctgaaaatcaagaagggcagctccaagcagagcagcagcgagctggtggatagcgacatcctgaaagacagcttcgacctggcctccgagctgaaaggcgaaaagctgatgctgtacagggaccccagcggcaatgtgttccccagcgacaaatggatggccgctggcgtgttcttcggaaagctggaacgcatcctgatcagcaagctgaccaaccagtactccatcagcaccatcgaggacgacagcagcaagcagtctatgaaaaggccggcggccacgaaaaaggccggccaggcaaaaaagaaaaag

SEQ ID NO: 261 - protein, 17 aa, synthetic construct
  REGION 1..17: note = synthetic peptide sequence
MAPKKKRKVGIHGVPAA

SEQ ID NO: 262 - DNA, 51 bp, synthetic construct
  misc_feature 1..51: note = synthetic oligonucleotide sequence
  source 1..51: mol_type = other DNA
atggccccaaagaagaagcggaaggtcggtatccacggagtcccagcagcc

SEQ ID NO: 263 - protein, 1554 aa, synthetic construct
  REGION 1..1554: note = 101 Cas9 TadAins 1015 polypeptide sequence
MDKKYSIGLAIGTNSVGWAVITDEYKVPSKKFKVLGNTDRHSIKKNLIGALLFDSGETAEATRLKRTARRRYTRRKNRICYLQEIFSNEMAKVDDSFFHRLEESFLVEEDKKHERHPIFGNIVDEVAYHEKYPTIYHLRKKLVDSTDKADLRLIYLALAHMIKFRGHFLIEGDLNPDNSDVDKLFIQLVQTYNQLFEENPINASGVDAKAILSARLSKSRRLENLIAQLPGEKKNGLFGNLIALSLGLTPNFKSNFDLAEDAKLQLSKDTYDDDLDNLLAQIGDQYADLFLAAKNLSDAILLSDILRVNTEITKAPLSASMIKRYDEHHQDLTLLKALVRQQLPEKYKEIFFDQSKNGYAGYIDGGASQEEFYKFIKPILEKMDGTEELLVKLNREDLLRKQRTFDNGSIPHQIHLGELHAILRRQEDFYPFLKDNREKIEKILTFRIPYYVGPLARGNSRFAWMTRKSEETITPWNFEEVVDKGASAQSFIERMTNFDKNLPNEKVLPKHSLLYEYFTVYNELTKVKYVTEGMRKPAFLSGEQKKAIVDLLFKTNRKVTVKQLKEDYFKKIECFDSVEISGVEDRFNASLGTYHDLLKIIKDKDFLDNEENEDILEDIVLTLTLFEDREMIEERLKTYAHLFDDKVMKQLKRRRYTGWGRLSRKLINGIRDKQSGKTILDFLKSDGFANRNFMQLIHDDSLTFKEDIQKAQVSGQGDSLHEHIANLAGSPAIKKGILQTVKVVDELVKVMGRHKPENIVIEMARENQTTQKGQKNSRERMKRIEEGIKELGSQILKEHPVENTQLQNEKLYLYYLQNGRDMYVDQELDINRLSDYDVDHIVPQSFLKDDSIDNKVLTRSDKNRGKSDNVPSEEVVKKMKNYWRQLLNAKLITQRKFDNLTKAERGGLSELDKAGFIKRQLVETRQITKHVAQILDSRMNTKYDENDKLIREVKVITLKSKLVSDFRKDFQFYKVREINNYHHAHDAYLNAVVGTALIKKYPKLESEFVYGDYKVGSSGSETPGTSESATPESSGSEVEFSHEYWMRHALTLAKRARDEREVPVGAVLVLNNRVIGEGWNRAIGLHDPTAHAEIMALRQGGLVMQNYRLIDATLYVTFEPCVMCAGAMIHSRIGRVVFGVRNAKTGAAGSLMDVLHYPGMNHRVEITEGILADECAALLCYFFRMPRQVFNAQKKAQSSTDYDVRKMIAKSEQEIGKATAKYFFYSNIMNFFKTEITLANGEIRKRPLIETNGETGEIVWDKGRDFATVRKVLSMPQVNIVKKTEVQTGGFSKESILPKRNSDKLIARKKDWDPKKYGGFDSPTVAYSVLVVAKVEKGKSKKLKSVKELLGITIMERSSFEKNPIDFLEAKGYKEVKKDLIIKLPKYSLFELENGRKRMLASAGELQKGNELALPSKYVNFLYLASHYEKLKGSPEDNEQKQLFVEQHKHYLDEIIEQISEFSKRVILADANLDKVLSAYNKHRDKPIREQAENIIHLFTLTNLGAPAAFKYFDTTIDRKRYTSTKEVLDATLIHQSITGLYETRIDLSQLGGD

SEQ ID NO: 264 - protein, 1554 aa, synthetic construct
  REGION 1..1554: note = 102 Cas9 TadAins 1022 polypeptide sequence
MDKKYSIGLAIGTNSVGWAVITDEYKVPSKKFKVLGNTDRHSIKKNLIGALLFDSGETAEATRLKRTARRRYTRRKNRICYLQEIFSNEMAKVDDSFFHRLEESFLVEEDKKHERHPIFGNIVDEVAYHEKYPTIYHLRKKLVDSTDKADLRLIYLALAHMIKFRGHFLIEGDLNPDNSDVDKLFIQLVQTYNQLFEENPINASGVDAKAILSARLSKSRRLENLIAQLPGEKKNGLFGNLIALSLGLTPNFKSNFDLAEDAKLQLSKDTYDDDLDNLLAQIGDQYADLFLAAKNLSDAILLSDILRVNTEITKAPLSASMIKRYDEHHQDLTLLKALVRQQLPEKYKEIFFDQSKNGYAGYIDGGASQEEFYKFIKPILEKMDGTEELLVKLNREDLLRKQRTFDNGSIPHQIHLGELHAILRRQEDFYPFLKDNREKIEKILTFRIPYYVGPLARGNSRFAWMTRKSEETITPWNFEEVVDKGASAQSFIERMTNFDKNLPNEKVLPKHSLLYEYFTVYNELTKVKYVTEGMRKPAFLSGEQKKAIVDLLFKTNRKVTVKQLKEDYFKKIECFDSVEISGVEDRFNASLGTYHDLLKIIKDKDFLDNEENEDILEDIVLTLTLFEDREMIEERLKTYAHLFDDKVMKQLKRRRYTGWGRLSRKLINGIRDKQSGKTILDFLKSDGFANRNFMQLIHDDSLTFKEDIQKAQVSGQGDSLHEHIANLAGSPAIKKGILQTVKVVDELVKVMGRHKPENIVIEMARENQTTQKGQKNSRERMKRIEEGIKELGSQILKEHPVENTQLQNEKLYLYYLQNGRDMYVDQELDINRLSDYDVDHIVPQSFLKDDSIDNKVLTRSDKNRGKSDNVPSEEVVKKMKNYWRQLLNAKLITQRKFDNLTKAERGGLSELDKAGFIKRQLVETRQITKHVAQILDSRMNTKYDENDKLIREVKVITLKSKLVSDFRKDFQFYKVREINNYHHAHDAYLNAVVGTALIKKYPKLESEFVYGDYKVYDVRKMIGSSGSETPGTSESATPESSGSEVEFSHEYWMRHALTLAKRARDEREVPVGAVLVLNNRVIGEGWNRAIGLHDPTAHAEIMALRQGGLVMQNYRLIDATLYVTFEPCVMCAGAMIHSRIGRVVFGVRNAKTGAAGSLMDVLHYPGMNHRVEITEGILADECAALLCYFFRMPRQVFNAQKKAQSSTDAKSEQEIGKATAKYFFYSNIMNFFKTEITLANGEIRKRPLIETNGETGEIVWDKGRDFATVRKVLSMPQVNIVKKTEVQTGGFSKESILPKRNSDKLIARKKDWDPKKYGGFDSPTVAYSVLVVAKVEKGKSKKLKSVKELLGITIMERSSFEKNPIDFLEAKGYKEVKKDLIIKLPKYSLFELENGRKRMLASAGELQKGNELALPSKYVNFLYLASHYEKLKGSPEDNEQKQLFVEQHKHYLDEIIEQISEFSKRVILADANLDKVLSAYNKHRDKPIREQAENIIHLFTLTNLGAPAAFKYFDTTIDRKRYTSTKEVLDATLIHQSITGLYETRIDLSQLGGD

SEQ ID NO: 265 - protein, 1554 aa, synthetic construct
  REGION 1..1554: note = 103 Cas9 TadAins 1029 polypeptide sequence
MDKKYSIGLAIGTNSVGWAVITDEYKVPSKKFKVLGNTDRHSIKKNLIGALLFDSGETAEATRLKRTARRRYTRRKNRICYLQEIFSNEMAKVDDSFFHRLEESFLVEEDKKHERHPIFGNIVDEVAYHEKYPTIYHLRKKLVDSTDKADLRLIYLALAHMIKFRGHFLIEGDLNPDNSDVDKLFIQLVQTYNQLFEENPINASGVDAKAILSARLSKSRRLENLIAQLPGEKKNGLFGNLIALSLGLTPNFKSNFDLAEDAKLQLSKDTYDDDLDNLLAQIGDQYADLFLAAKNLSDAILLSDILRVNTEITKAPLSASMIKRYDEHHQDLTLLKALVRQQLPEKYKEIFFDQSKNGYAGYIDGGASQEEFYKFIKPILEKMDGTEELLVKLNREDLLRKQRTFDNGSIPHQIHLGELHAILRRQEDFYPFLKDNREKIEKILTFRIPYYVGPLARGNSRFAWMTRKSEETITPWNFEEVVDKGASAQSFIERMTNFDKNLPNEKVLPKHSLLYEYFTVYNELTKVKYVTEGMRKPAFLSGEQKKAIVDLLFKTNRKVTVKQLKEDYFKKIECFDSVEISGVEDRFNASLGTYHDLLKIIKDKDFLDNEENEDILEDIVLTLTLFEDREMIEERLKTYAHLFDDKVMKQLKRRRYTGWGRLSRKLINGIRDKQSGKTILDFLKSDGFANRNFMQLIHDDSLTFKEDIQKAQVSGQGDSLHEHIANLAGSPAIKKGILQTVKVVDELVKVMGRHKPENIVIEMARENQTTQKGQKNSRERMKRIEEGIKELGSQILKEHPVENTQLQNEKLYLYYLQNGRDMYVDQELDINRLSDYDVDHIVPQSFLKDDSIDNKVLTRSDKNRGKSDNVPSEEVVKKMKNYWRQLLNAKLITQRKFDNLTKAERGGLSELDKAGFIKRQLVETRQITKHVAQILDSRMNTKYDENDKLIREVKVITLKSKLVSDFRKDFQFYKVREINNYHHAHDAYLNAVVGTALIKKYPKLESEFVYGDYKVYDVRKMIAKSEQEIGSSGSETPGTSESATPESSGSEVEFSHEYWMRHALTLAKRARDEREVPVGAVLVLNNRVIGEGWNRAIGLHDPTAHAEIMALRQGGLVMQNYRLIDATLYVTFEPCVMCAGAMIHSRIGRVVFGVRNAKTGAAGSLMDVLHYPGMNHRVEITEGILADECAALLCYFFRMPRQVFNAQKKAQSSTDGKATAKYFFYSNIMNFFKTEITLANGEIRKRPLIETNGETGEIVWDKGRDFATVRKVLSMPQVNIVKKTEVQTGGFSKESILPKRNSDKLIARKKDWDPKKYGGFDSPTVAYSVLVVAKVEKGKSKKLKSVKELLGITIMERSSFEKNPIDFLEAKGYKEVKKDLIIKLPKYSLFELENGRKRMLASAGELQKGNELALPSKYVNFLYLASHYEKLKGSPEDNEQKQLFVEQHKHYLDEIIEQISEFSKRVILADANLDKVLSAYNKHRDKPIREQAENIIHLFTLTNLGAPAAFKYFDTTIDRKRYTSTKEVLDATLIHQSITGLYETRIDLSQLGGD

SEQ ID NO: 266 - protein, 1554 aa, synthetic construct
  REGION 1..1554: note = 103 Cas9 TadAins 1040 polypeptide sequence
MDKKYSIGLAIGTNSVGWAVITDEYKVPSKKFKVLGNTDRHSIKKNLIGALLFDSGETAEATRLKRTARRRYTRRKNRICYLQEIFSNEMAKVDDSFFHRLEESFLVEEDKKHERHPIFGNIVDEVAYHEKYPTIYHLRKKLVDSTDKADLRLIYLALAHMIKFRGHFLIEGDLNPDNSDVDKLFIQLVQTYNQLFEENPINASGVDAKAILSARLSKSRRLENLIAQLPGEKKNGLFGNLIALSLGLTPNFKSNFDLAEDAKLQLSKDTYDDDLDNLLAQIGDQYADLFLAAKNLSDAILLSDILRVNTEITKAPLSASMIKRYDEHHQDLTLLKALVRQQLPEKYKEIFFDQSKNGYAGYIDGGASQEEFYKFIKPILEKMDGTEELLVKLNREDLLRKQRTFDNGSIPHQIHLGELHAILRRQEDFYPFLKDNREKIEKILTFRIPYYVGPLARGNSRFAWMTRKSEETITPWNFEEVVDKGASAQSFIERMTNFDKNLPNEKVLPKHSLLYEYFTVYNELTKVKYVTEGMRKPAFLSGEQKKAIVDLLFKTNRKVTVKQLKEDYFKKIECFDSVEISGVEDRFNASLGTYHDLLKIIKDKDFLDNEENEDILEDIVLTLTLFEDREMIEERLKTYAHLFDDKVMKQLKRRRYTGWGRLSRKLINGIRDKQSGKTILDFLKSDGFANRNFMQLIHDDSLTFKEDIQKAQVSGQGDSLHEHIANLAGSPAIKKGILQTVKVVDELVKVMGRHKPENIVIEMARENQTTQKGQKNSRERMKRIEEGIKELGSQILKEHPVENTQLQNEKLYLYYLQNGRDMYVDQELDINRLSDYDVDHIVPQSFLKDDSIDNKVLTRSDKNRGKSDNVPSEEVVKKMKNYWRQLLNAKLITQRKFDNLTKAERGGLSELDKAGFIKRQLVETRQITKHVAQILDSRMNTKYDENDKLIREVKVITLKSKLVSDFRKDFQFYKVREINNYHHAHDAYLNAVVGTALIKKYPKLESEFVYGDYKVYDVRKMIAKSEQEIGKATAKYFFYSGSSGSETPGTSESATPESSGSEVEFSHEYWMRHALTLAKRARDEREVPVGAVLVLNNRVIGEGWNRAIGLHDPTAHAEIMALRQGGLVMQNYRLIDATLYVTFEPCVMCAGAMIHSRIGRVVFGVRNAKTGAAGSLMDVLHYPGMNHRVEITEGILADECAALLCYFFRMPRQVFNAQKKAQSSTDNIMNFFKTEITLANGEIRKRPLIETNGETGEIVWDKGRDFATVRKVLSMPQVNIVKKTEVQTGGFSKESILPKRNSDKLIARKKDWDPKKYGGFDSPTVAYSVLVVAKVEKGKSKKLKSVKELLGITIMERSSFEKNPIDFLEAKGYKEVKKDLIIKLPKYSLFELENGRKRMLASAGELQKGNELALPSKYVNFLYLASHYEKLKGSPEDNEQKQLFVEQHKHYLDEIIEQISEFSKRVILADANLDKVLSAYNKHRDKPIREQAENIIHLFTLTNLGAPAAFKYFDTTIDRKRYTSTKEVLDATLIHQSITGLYETRIDLSQLGGD

SEQ ID NO: 267 - protein, 1554 aa, synthetic construct
  REGION 1..1554: note = 105 Cas9 TadAins 1068 polypeptide sequence
MDKKYSIGLAIGTNSVGWAVITDEYKVPSKKFKVLGNTDRHSIKKNLIGALLFDSGETAEATRLKRTARRRYTRRKNRICYLQEIFSNEMAKVDDSFFHRLEESFLVEEDKKHERHPIFGNIVDEVAYHEKYPTIYHLRKKLVDSTDKADLRLIYLALAHMIKFRGHFLIEGDLNPDNSDVDKLFIQLVQTYNQLFEENPINASGVDAKAILSARLSKSRRLENLIAQLPGEKKNGLFGNLIALSLGLTPNFKSNFDLAEDAKLQLSKDTYDDDLDNLLAQIGDQYADLFLAAKNLSDAILLSDILRVNTEITKAPLSASMIKRYDEHHQDLTLLKALVRQQLPEKYKEIFFDQSKNGYAGYIDGGASQEEFYKFIKPILEKMDGTEELLVKLNREDLLRKQRTFDNGSIPHQIHLGELHAILRRQEDFYPFLKDNREKIEKILTFRIPYYVGPLARGNSRFAWMTRKSEETITPWNFEEVVDKGASAQSFIERMTNFDKNLPNEKVLPKHSLLYEYFTVYNELTKVKYVTEGMRKPAFLSGEQKKAIVDLLFKTNRKVTVKQLKEDYFKKIECFDSVEISGVEDRFNASLGTYHDLLKIIKDKDFLDNEENEDILEDIVLTLTLFEDREMIEERLKTYAHLFDDKVMKQLKRRRYTGWGRLSRKLINGIRDKQSGKTILDFLKSDGFANRNFMQLIHDDSLTFKEDIQKAQVSGQGDSLHEHIANLAGSPAIKKGILQTVKVVDELVKVMGRHKPENIVIEMARENQTTQKGQKNSRERMKRIEEGIKELGSQILKEHPVENTQLQNEKLYLYYLQNGRDMYVDQELDINRLSDYDVDHIVPQSFLKDDSIDNKVLTRSDKNRGKSDNVPSEEVVKKMKNYWRQLLNAKLITQRKFDNLTKAERGGLSELDKAGFIKRQLVETRQITKHVAQILDSRMNTKYDENDKLIREVKVITLKSKLVSDFRKDFQFYKVREINNYHHAHDAYLNAVVGTALIKKYPKLESEFVYGDYKVYDVRKMIAKSEQEIGKATAKYFFYSNIMNFFKTEITLANGEIRKRPLIETNGEGSSGSETPGTSESATPESSGSEVEFSHEYWMRHALTLAKRARDEREVPVGAVLVLNNRVIGEGWNRAIGLHDPTAHAEIMALRQGGLVMQNYRLIDATLYVTFEPCVMCAGAMIHSRIGRVVFGVRNAKTGAAGSLMDVLHYPGMNHRVEITEGILADECAALLCYFFRMPRQVFNAQKKAQSSTDTGEIVWDKGRDFATVRKVLSMPQVNIVKKTEVQTGGFSKESILPKRNSDKLIARKKDWDPKKYGGFDSPTVAYSVLVVAKVEKGKSKKLKSVKELLGITIMERSSFEKNPIDFLEAKGYKEVKKDLIIKLPKYSLFELENGRKRMLASAGELQKGNELALPSKYVNFLYLASHYEKLKGSPEDNEQKQLFVEQHKHYLDEIIEQISEFSKRVILADANLDKVLSAYNKHRDKPIREQAENIIHLFTLTNLGAPAAFKYFDTTIDRKRYTSTKEVLDATLIHQSITGLYETRIDLSQLGGD

SEQ ID NO: 268 - protein, 1554 aa, synthetic construct
  REGION 1..1554: note = 106 Cas9 TadAins 1247 polypeptide sequence
MDKKYSIGLAIGTNSVGWAVITDEYKVPSKKFKVLGNTDRHSIKKNLIGALLFDSGETAEATRLKRTARRRYTRRKNRICYLQEIFSNEMAKVDDSFFHRLEESFLVEEDKKHERHPIFGNIVDEVAYHEKYPTIYHLRKKLVDSTDKADLRLIYLALAHMIKFRGHFLIEGDLNPDNSDVDKLFIQLVQTYNQLFEENPINASGVDAKAILSARLSKSRRLENLIAQLPGEKKNGLFGNLIALSLGLTPNFKSNFDLAEDAKLQLSKDTYDDDLDNLLAQIGDQYADLFLAAKNLSDAILLSDILRVNTEITKAPLSASMIKRYDEHHQDLTLLKALVRQQLPEKYKEIFFDQSKNGYAGYIDGGASQEEFYKFIKPILEKMDGTEELLVKLNREDLLRKQRTFDNGSIPHQIHLGELHAILRRQEDFYPFLKDNREKIEKILTFRIPYYVGPLARGNSRFAWMTRKSEETITPWNFEEVVDKGASAQSFIERMTNFDKNLPNEKVLPKHSLLYEYFTVYNELTKVKYVTEGMRKPAFLSGEQKKAIVDLLFKTNRKVTVKQLKEDYFKKIECFDSVEISGVEDRFNASLGTYHDLLKIIKDKDFLDNEENEDILEDIVLTLTLFEDREMIEERLKTYAHLFDDKVMKQLKRRRYTGWGRLSRKLINGIRDKQSGKTILDFLKSDGFANRNFMQLIHDDSLTFKEDIQKAQVSGQGDSLHEHIANLAGSPAIKKGILQTVKVVDELVKVMGRHKPENIVIEMARENQTTQKGQKNSRERMKRIEEGIKELGSQILKEHPVENTQLQNEKLYLYYLQNGRDMYVDQELDINRLSDYDVDHIVPQSFLKDDSIDNKVLTRSDKNRGKSDNVPSEEVVKKMKNYWRQLLNAKLITQRKFDNLTKAERGGLSELDKAGFIKRQLVETRQITKHVAQILDSRMNTKYDENDKLIREVKVITLKSKLVSDFRKDFQFYKVREINNYHHAHDAYLNAVVGTALIKKYPKLESEFVYGDYKVYDVRKMIAKSEQEIGKATAKYFFYSNIMNFFKTEITLANGEIRKRPLIETNGETGEIVWDKGRDFATVRKVLSMPQVNIVKKTEVQTGGFSKESILPKRNSDKLIARKKDWDPKKYGGFDSPTVAYSVLVVAKVEKGKSKKLKSVKELLGITIMERSSFEKNPIDFLEAKGYKEVKKDLIIKLPKYSLFELENGRKRMLASAGELQKGNELALPSKYVNFLYLASHYEKLKGGSSGSETPGTSESATPESSGSEVEFSHEYWMRHALTLAKRARDEREVPVGAVLVLNNRVIGEGWNRAIGLHDPTAHAEIMALRQGGLVMQNYRLIDATLYVTFEPCVMCAGAMIHSRIGRVVFGVRNAKTGAAGSLMDVLHYPGMNHRVEITEGILADECAALLCYFFRMPRQVFNAQKKAQSSTDSPEDNEQKQLFVEQHKHYLDEIIEQISEFSKRVILADANLDKVLSAYNKHRDKPIREQAENIIHLFTLTNLGAPAAFKYFDTTIDRKRYTSTKEVLDATLIHQSITGLYETRIDLSQLGGD

SEQ ID NO: 269 - protein, 1554 aa, synthetic construct
  REGION 1..1554: note = 107 Cas9 TadAins 1054 polypeptide sequence
MDKKYSIGLAIGTNSVGWAVITDEYKVPSKKFKVLGNTDRHSIKKNLIGALLFDSGETAEATRLKRTARRRYTRRKNRICYLQEIFSNEMAKVDDSFFHRLEESFLVEEDKKHERHPIFGNIVDEVAYHEKYPTIYHLRKKLVDSTDKADLRLIYLALAHMIKFRGHFLIEGDLNPDNSDVDKLFIQLVQTYNQLFEENPINASGVDAKAILSARLSKSRRLENLIAQLPGEKKNGLFGNLIALSLGLTPNFKSNFDLAEDAKLQLSKDTYDDDLDNLLAQIGDQYADLFLAAKNLSDAILLSDILRVNTEITKAPLSASMIKRYDEHHQDLTLLKALVRQQLPEKYKEIFFDQSKNGYAGYIDGGASQEEFYKFIKPILEKMDGTEELLVKLNREDLLRKQRTFDNGSIPHQIHLGELHAILRRQEDFYPFLKDNREKIEKILTFRIPYYVGPLARGNSRFAWMTRKSEETITPWNFEEVVDKGASAQSFIERMTNFDKNLPNEKVLPKHSLLYEYFTVYNELTKVKYVTEGMRKPAFLSGEQKKAIVDLLFKTNRKVTVKQLKEDYFKKIECFDSVEISGVEDRFNASLGTYHDLLKIIKDKDFLDNEENEDILEDIVLTLTLFEDREMIEERLKTYAHLFDDKVMKQLKRRRYTGWGRLSRKLINGIRDKQSGKTILDFLKSDGFANRNFMQLIHDDSLTFKEDIQKAQVSGQGDSLHEHIANLAGSPAIKKGILQTVKVVDELVKVMGRHKPENIVIEMARENQTTQKGQKNSRERMKRIEEGIKELGSQILKEHPVENTQLQNEKLYLYYLQNGRDMYVDQELDINRLSDYDVDHIVPQSFLKDDSIDNKVLTRSDKNRGKSDNVPSEEVVKKMKNYWRQLLNAKLITQRKFDNLTKAERGGLSELDKAGFIKRQLVETRQITKHVAQILDSRMNTKYDENDKLIREVKVITLKSKLVSDFRKDFQFYKVREINNYHHAHDAYLNAVVGTALIKKYPKLESEFVYGDYKVYDVRKMIAKSEQEIGKATAKYFFYSNIMNFFKTEITLANGSSGSETPGTSESATPESSGSEVEFSHEYWMRHALTLAKRARDEREVPVGAVLVLNNRVIGEGWNRAIGLHDPTAHAEIMALRQGGLVMQNYRLIDATLYVTFEPCVMCAGAMIHSRIGRVVFGVRNAKTGAAGSLMDVLHYPGMNHRVEITEGILADECAALLCYFFRMPRQVFNAQKKAQSSTDGEIRKRPLIETNGETGEIVWDKGRDFATVRKVLSMPQVNIVKKTEVQTGGFSKESILPKRNSDKLIARKKDWDPKKYGGFDSPTVAYSVLVVAKVEKGKSKKLKSVKELLGITIMERSSFEKNPIDFLEAKGYKEVKKDLIIKLPKYSLFELENGRKRMLASAGELQKGNELALPSKYVNFLYLASHYEKLKGSPEDNEQKQLFVEQHKHYLDEIIEQISEFSKRVILADANLDKVLSAYNKHRDKPIREQAENIIHLFTLTNLGAPAAFKYFDTTIDRKRYTSTKEVLDATLIHQSITGLYETRIDLSQLGGD

SEQ ID NO: 270 - protein, 1554 aa, synthetic construct
  REGION 1..1554: note = 108 Cas9 TadAins 1026 polypeptide sequence
MDKKYSIGLAIGTNSVGWAVITDEYKVPSKKFKVLGNTDRHSIKKNLIGALLFDSGETAEATRLKRTARRRYTRRKNRICYLQEIFSNEMAKVDDSFFHRLEESFLVEEDKKHERHPIFGNIVDEVAYHEKYPTIYHLRKKLVDSTDKADLRLIYLALAHMIKFRGHFLIEGDLNPDNSDVDKLFIQLVQTYNQLFEENPINASGVDAKAILSARLSKSRRLENLIAQLPGEKKNGLFGNLIALSLGLTPNFKSNFDLAEDAKLQLSKDTYDDDLDNLLAQIGDQYADLFLAAKNLSDAILLSDILRVNTEITKAPLSASMIKRYDEHHQDLTLLKALVRQQLPEKYKEIFFDQSKNGYAGYIDGGASQEEFYKFIKPILEKMDGTEELLVKLNREDLLRKQRTFDNGSIPHQIHLGELHAILRRQEDFYPFLKDNREKIEKILTFRIPYYVGPLARGNSRFAWMTRKSEETITPWNFEEVVDKGASAQSFIERMTNFDKNLPNEKVLPKHSLLYEYFTVYNELTKVKYVTEGMRKPAFLSGEQKKAIVDLLFKTNRKVTVKQLKEDYFKKIECFDSVEISGVEDRFNASLGTYHDLLKIIKDKDFLDNEENEDILEDIVLTLTLFEDREMIEERLKTYAHLFDDKVMKQLKRRRYTGWGRLSRKLINGIRDKQSGKTILDFLKSDGFANRNFMQLIHDDSLTFKEDIQKAQVSGQGDSLHEHIANLAGSPAIKKGILQTVKVVDELVKVMGRHKPENIVIEMARENQTTQKGQKNSRERMKRIEEGIKELGSQILKEHPVENTQLQNEKLYLYYLQNGRDMYVDQELDINRLSDYDVDHIVPQSFLKDDSIDNKVLTRSDKNRGKSDNVPSEEVVKKMKNYWRQLLNAKLITQRKFDNLTKAERGGLSELDKAGFIKRQLVETRQITKHVAQILDSRMNTKYDENDKLIREVKVITLKSKLVSDFRKDFQFYKVREINNYHHAHDAYLNAVVGTALIKKYPKLESEFVYGDYKVYDVRKMIAKSEGSSGSETPGTSESATPESSGSEVEFSHEYWMRHALTLAKRARDEREVPVGAVLVLNNRVIGEGWNRAIGLHDPTAHAEIMALRQGGLVMQNYRLIDATLYVTFEPCVMCAGAMIHSRIGRVVFGVRNAKTGAAGSLMDVLHYPGMNHRVEITEGILADECAALLCYFFRMPRQVFNAQKKAQSSTDQEIGKATAKYFFYSNIMNFFKTEITLANGEIRKRPLIETNGETGEIVWDKGRDFATVRKVLSMPQVNIVKKTEVQTGGFSKESILPKRNSDKLIARKKDWDPKKYGGFDSPTVAYSVLVVAKVEKGKSKKLKSVKELLGITIMERSSFEKNPIDFLEAKGYKEVKKDLIIKLPKYSLFELENGRKRMLASAGELQKGNELALPSKYVNFLYLASHYEKLKGSPEDNEQKQLFVEQHKHYLDEIIEQISEFSKRVILADANLDKVLSAYNKHRDKPIREQAENIIHLFTLTNLGAPAAFKYFDTTIDRKRYTSTKEVLDATLIHQSITGLYETRIDLSQLGGD

SEQ ID NO: 271 - protein, 1540 aa, synthetic construct
  REGION 1..1540: note = 109 Cas9 TadAins 768 polypeptide sequence
MDKKYSIGLAIGTNSVGWAVITDEYKVPSKKFKVLGNTDRHSIKKNLIGALLFDSGETAEATRLKRTARRRYTRRKNRICYLQEIFSNEMAKVDDSFFHRLEESFLVEEDKKHERHPIFGNIVDEVAYHEKYPTIYHLRKKLVDSTDKADLRLIYLALAHMIKFRGHFLIEGDLNPDNSDVDKLFIQLVQTYNQLFEENPINASGVDAKAILSARLSKSRRLENLIAQLPGEKKNGLFGNLIALSLGLTPNFKSNFDLAEDAKLQLSKDTYDDDLDNLLAQIGDQYADLFLAAKNLSDAILLSDILRVNTEITKAPLSASMIKRYDEHHQDLTLLKALVRQQLPEKYKEIFFDQSKNGYAGYIDGGASQEEFYKFIKPILEKMDGTEELLVKLNREDLLRKQRTFDNGSIPHQIHLGELHAILRRQEDFYPFLKDNREKIEKILTFRIPYYVGPLARGNSRFAWMTRKSEETITPWNFEEVVDKGASAQSFIERMTNFDKNLPNEKVLPKHSLLYEYFTVYNELTKVKYVTEGMRKPAFLSGEQKKAIVDLLFKTNRKVTVKQLKEDYFKKIECFDSVEISGVEDRFNASLGTYHDLLKIIKDKDFLDNEENEDILEDIVLTLTLFEDREMIEERLKTYAHLFDDKVMKQLKRRRYTGWGRLSRKLINGIRDKQSGKTILDFLKSDGFANRNFMQLIHDDSLTFKEDIQKAQVSGQGDSLHEHIANLAGSPAIKKGILQTVKVVDELVKVMGRHKPENIVIEMARENQGSSGSETPGTSESATPESSGSEVEFSHEYWMRHALTLAKRARDEREVPVGAVLVLNNRVIGEGWNRAIGLHDPTAHAEIMALRQGGLVMQNYRLIDATLYVTFEPCVMCAGAMIHSRIGRVVFGVRNAKTGAAGSLMDVLHYPGMNHRVEITEGILADECAALLCYFFRMPRTTQKGQKNSRERMKRIEEGIKELGSQILKEHPVENTQLQNEKLYLYYLQNGRDMYVDQELDINRLSDYDVDHIVPQSFLKDDSIDNKVLTRSDKNRGKSDNVPSEEVVKKMKNYWRQLLNAKLITQRKFDNLTKAERGGLSELDKAGFIKRQLVETRQITKHVAQILDSRMNTKYDENDKLIREVKVITLKSKLVSDFRKDFQFYKVREINNYHHAHDAYLNAVVGTALIKKYPKLESEFVYGDYKVYDVRKMIAKSEQEIGKATAKYFFYSNIMNFFKTEITLANGEIRKRPLIETNGETGEIVWDKGRDFATVRKVLSMPQVNIVKKTEVQTGGFSKESILPKRNSDKLIARKKDWDPKKYGGFDSPTVAYSVLVVAKVEKGKSKKLKSVKELLGITIMERSSFEKNPIDFLEAKGYKEVKKDLIIKLPKYSLFELENGRKRMLASAGELQKGNELALPSKYVNFLYLASHYEKLKGSPEDNEQKQLFVEQHKHYLDEIIEQISEFSKRVILADANLDKVLSAYNKHRDKPIREQAENIIHLFTLTNLGAPAAFKYFDTTIDRKRYTSTKEVLDATLIHQSITGLYETRIDLSQLGGD

SEQ ID NO: 272 - protein, 1540 aa, synthetic construct
  REGION 1..1540: note = 110.1 Cas9 TadAins 1250 polypeptide sequence
MDKKYSIGLAIGTNSVGWAVITDEYKVPSKKFKVLGNTDRHSIKKNLIGALLFDSGETAEATRLKRTARRRYTRRKNRICYLQEIFSNEMAKVDDSFFHRLEESFLVEEDKKHERHPIFGNIVDEVAYHEKYPTIYHLRKKLVDSTDKADLRLIYLALAHMIKFRGHFLIEGDLNPDNSDVDKLFIQLVQTYNQLFEENPINASGVDAKAILSARLSKSRRLENLIAQLPGEKKNGLFGNLIALSLGLTPNFKSNFDLAEDAKLQLSKDTYDDDLDNLLAQIGDQYADLFLAAKNLSDAILLSDILRVNTEITKAPLSASMIKRYDEHHQDLTLLKALVRQQLPEKYKEIFFDQSKNGYAGYIDGGASQEEFYKFIKPILEKMDGTEELLVKLNREDLLRKQRTFDNGSIPHQIHLGELHAILRRQEDFYPFLKDNREKIEKILTFRIPYYVGPLARGNSRFAWMTRKSEETITPWNFEEVVDKGASAQSFIERMTNFDKNLPNEKVLPKHSLLYEYFTVYNELTKVKYVTEGMRKPAFLSGEQKKAIVDLLFKTNRKVTVKQLKEDYFKKIECFDSVEISGVEDRFNASLGTYHDLLKIIKDKDFLDNEENEDILEDIVLTLTLFEDREMIEERLKTYAHLFDDKVMKQLKRRRYTGWGRLSRKLINGIRDKQSGKTILDFLKSDGFANRNFMQLIHDDSLTFKEDIQKAQVSGQGDSLHEHIANLAGSPAIKKGILQTVKVVDELVKVMGRHKPENIVIEMARENQTTQKGQKNSRERMKRIEEGIKELGSQILKEHPVENTQLQNEKLYLYYLQNGRDMYVDQELDINRLSDYDVDHIVPQSFLKDDSIDNKVLTRSDKNRGKSDNVPSEEVVKKMKNYWRQLLNAKLITQRKFDNLTKAERGGLSELDKAGFIKRQLVETRQITKHVAQILDSRMNTKYDENDKLIREVKVITLKSKLVSDFRKDFQFYKVREINNYHHAHDAYLNAVVGTALIKKYPKLESEFVYGDYKVYDVRKMIAKSEQEIGKATAKYFFYSNIMNFFKTEITLANGEIRKRPLIETNGETGEIVWDKGRDFATVRKVLSMPQVNIVKKTEVQTGGFSKESILPKRNSDKLIARKKDWDPKKYGGFDSPTVAYSVLVVAKVEKGKSKKLKSVKELLGITIMERSSFEKNPIDFLEAKGYKEVKKDLIIKLPKYSLFELENGRKRMLASAGELQKGNELALPSKYVNFLYLASHYEKLKGSPGSSGSETPGTSESATPESSGSEVEFSHEYWMRHALTLAKRARDEREVPVGAVLVLNNRVIGEGWNRAIGLHDPTAHAEIMALRQGGLVMQNYRLIDATLYVTFEPCVMCAGAMIHSRIGRVVFGVRNAKTGAAGSLMDVLHYPGMNHRVEITEGILADECAALLCYFFRMPREDNEQKQLFVEQHKHYLDEIIEQISEFSKRVILADANLDKVLSAYNKHRDKPIREQAENIIHLFTLTNLGAPAAFKYFDTTIDRKRYTSTKEVLDATLIHQSITGLYETRIDLSQLGGD

SEQ ID NO: 273 - protein, 1543 aa, synthetic construct
  REGION 1..1543: note = 110.2 Cas9 TadAins 1250 polypeptide sequence
MDKKYSIGLAIGTNSVGWAVITDEYKVPSKKFKVLGNTDRHSIKKNLIGALLFDSGETAEATRLKRTARRRYTRRKNRICYLQEIFSNEMAKVDDSFFHRLEESFLVEEDKKHERHPIFGNIVDEVAYHEKYPTIYHLRKKLVDSTDKADLRLIYLALAHMIKFRGHFLIEGDLNPDNSDVDKLFIQLVQTYNQLFEENPINASGVDAKAILSARLSKSRRLENLIAQLPGEKKNGLFGNLIALSLGLTPNFKSNFDLAEDAKLQLSKDTYDDDLDNLLAQIGDQYADLFLAAKNLSDAILLSDILRVNTEITKAPLSASMIKRYDEHHQDLTLLKALVRQQLPEKYKEIFFDQSKNGYAGYIDGGASQEEFYKFIKPILEKMDGTEELLVKLNREDLLRKQRTFDNGSIPHQIHLGELHAILRRQEDFYPFLKDNREKIEKILTFRIPYYVGPLARGNSRFAWMTRKSEETITPWNFEEVVDKGASAQSFIERMTNFDKNLPNEKVLPKHSLLYEYFTVYNELTKVKYVTEGMRKPAFLSGEQKKAIVDLLFKTNRKVTVKQLKEDYFKKIECFDSVEISGVEDRFNASLGTYHDLLKIIKDKDFLDNEENEDILEDIVLTLTLFEDREMIEERLKTYAHLFDDKVMKQLKRRRYTGWGRLSRKLINGIRDKQSGKTILDFLKSDGFANRNFMQLIHDDSLTFKEDIQKAQVSGQGDSLHEHIANLAGSPAIKKGILQTVKVVDELVKVMGRHKPENIVIEMARENQTTQKGQKNSRERMKRIEEGIKELGSQILKEHPVENTQLQNEKLYLYYLQNGRDMYVDQELDINRLSDYDVDHIVPQSFLKDDSIDNKVLTRSDKNRGKSDNVPSEEVVKKMKNYWRQLLNAKLITQRKFDNLTKAERGGLSELDKAGFIKRQLVETRQITKHVAQILDSRMNTKYDENDKLIREVKVITLKSKLVSDFRKDFQFYKVREINNYHHAHDAYLNAVVGTALIKKYPKLESEFVYGDYKVYDVRKMIAKSEQEIGKATAKYFFYSNIMNFFKTEITLANGEIRKRPLIETNGETGEIVWDKGRDFATVRKVLSMPQVNIVKKTEVQTGGFSKESILPKRNSDKLIARKKDWDPKKYGGFDSPTVAYSVLVVAKVEKGKSKKLKSVKELLGITIMERSSFEKNPIDFLEAKGYKEVKKDLIIKLPKYSLFELENGRKRMLASAGELQKGNELALPSKYVNFLYLASHYEKLKGSPGSSGSSGSETPGTSESATPESSGSEVEFSHEYWMRHALTLAKRARDEREVPVGAVLVLNNRVIGEGWNRAIGLHDPTAHAEIMALRQGGLVMQNYRLIDATLYVTFEPCVMCAGAMIHSRIGRVVFGVRNAKTGAAGSLMDVLHYPGMNHRVEITEGILADECAALLCYFFRMPREDNEQKQLFVEQHKHYLDEIIEQISEFSKRVILADANLDKVLSAYNKHRDKPIREQAENIIHLFTLTNLGAPAAFKYFDTTIDRKRYTSTKEVLDATLIHQSITGLYETRIDLSQLGGD

SEQ ID NO: 274 - protein, 1546 aa, synthetic construct
  REGION 1..1546: note = 110.3 Cas9 TadAins 1250 polypeptide sequence
MDKKYSIGLAIGTNSVGWAVITDEYKVPSKKFKVLGNTDRHSIKKNLIGALLFDSGETAEATRLKRTARRRYTRRKNRICYLQEIFSNEMAKVDDSFFHRLEESFLVEEDKKHERHPIFGNIVDEVAYHEKYPTIYHLRKKLVDSTDKADLRLIYLALAHMIKFRGHFLIEGDLNPDNSDVDKLFIQLVQTYNQLFEENPINASGVDAKAILSARLSKSRRLENLIAQLPGEKKNGLFGNLIALSLGLTPNFKSNFDLAEDAKLQLSKDTYDDDLDNLLAQIGDQYADLFLAAKNLSDAILLSDILRVNTEITKAPLSASMIKRYDEHHQDLTLLKALVRQQLPEKYKEIFFDQSKNGYAGYIDGGASQEEFYKFIKPILEKMDGTEELLVKLNREDLLRKQRTFDNGSIPHQIHLGELHAILRRQEDFYPFLKDNREKIEKILTFRIPYYVGPLARGNSRFAWMTRKSEETITPWNFEEVVDKGASAQSFIERMTNFDKNLPNEKVLPKHSLLYEYFTVYNELTKVKYVTEGMRKPAFLSGEQKKAIVDLLFKTNRKVTVKQLKEDYFKKIECFDSVEISGVEDRFNASLGTYHDLLKIIKDKDFLDNEENEDILEDIVLTLTLFEDREMIEERLKTYAHLFDDKVMKQLKRRRYTGWGRLSRKLINGIRDKQSGKTILDFLKSDGFANRNFMQLIHDDSLTFKEDIQKAQVSGQGDSLHEHIANLAGSPAIKKGILQTVKVVDELVKVMGRHKPENIVIEMARENQTTQKGQKNSRERMKRIEEGIKELGSQILKEHPVENTQLQNEKLYLYYLQNGRDMYVDQELDINRLSDYDVDHIVPQSFLKDDSIDNKVLTRSDKNRGKSDNVPSEEVVKKMKNYWRQLLNAKLITQRKFDNLTKAERGGLSELDKAGFIKRQLVETRQITKHVAQILDSRMNTKYDENDKLIREVKVITLKSKLVSDFRKDFQFYKVREINNYHHAHDAYLNAVVGTALIKKYPKLESEFVYGDYKVYDVRKMIAKSEQEIGKATAKYFFYSNIMNFFKTEITLANGEIRKRPLIETNGETGEIVWDKGRDFATVRKVLSMPQVNIVKKTEVQTGGFSKESILPKRNSDKLIARKKDWDPKKYGGFDSPTVAYSVLVVAKVEKGKSKKLKSVKELLGITIMERSSFEKNPIDFLEAKGYKEVKKDLIIKLPKYSLFELENGRKRMLASAGELQKGNELALPSKYVNFLYLASHYEKLKGSPGSSGSSGSETPGTSESATPESGSSSGSEVEFSHEYWMRHALTLAKRARDEREVPVGAVLVLNNRVIGEGWNRAIGLHDPTAHAEIMALRQGGLVMQNYRLIDATLYVTFEPCVMCAGAMIHSRIGRVVFGVRNAKTGAAGSLMDVLHYPGMNHRVEITEGILADECAALLCYFFRMPREDNEQKQLFVEQHKHYLDEIIEQISEFSKRVILADANLDKVLSAYNKHRDKPIREQAENIIHLFTLTNLGAPAAFKYFDTTIDRKRYTSTKEVLDATLIHQSITGLYETRIDLSQLGGD

SEQ ID NO: 275 - protein, 1546 aa, synthetic construct
  REGION 1..1546: note = 110.4 Cas9 TadAins 1250 polypeptide sequence
MDKKYSIGLAIGTNSVGWAVITDEYKVPSKKFKVLGNTDRHSIKKNLIGALLFDSGETAEATRLKRTARRRYTRRKNRICYLQEIFSNEMAKVDDSFFHRLEESFLVEEDKKHERHPIFGNIVDEVAYHEKYPTIYHLRKKLVDSTDKADLRLIYLALAHMIKFRGHFLIEGDLNPDNSDVDKLFIQLVQTYNQLFEENPINASGVDAKAILSARLSKSRRLENLIAQLPGEKKNGLFGNLIALSLGLTPNFKSNFDLAEDAKLQLSKDTYDDDLDNLLAQIGDQYADLFLAAKNLSDAILLSDILRVNTEITKAPLSASMIKRYDEHHQDLTLLKALVRQQLPEKYKEIFFDQSKNGYAGYIDGGASQEEFYKFIKPILEKMDGTEELLVKLNREDLLRKQRTFDNGSIPHQIHLGELHAILRRQEDFYPFLKDNREKIEKILTFRIPYYVGPLARGNSRFAWMTRKSEETITPWNFEEVVDKGASAQSFIERMTNFDKNLPNEKVLPKHSLLYEYFTVYNELTKVKYVTEGMRKPAFLSGEQKKAIVDLLFKTNRKVTVKQLKEDYFKKIECFDSVEISGVEDRFNASLGTYHDLLKIIKDKDFLDNEENEDILEDIVLTLTLFEDREMIEERLKTYAHLFDDKVMKQLKRRRYTGWGRLSRKLINGIRDKQSGKTILDFLKSDGFANRNFMQLIHDDSLTFKEDIQKAQVSGQGDSLHEHIANLAGSPAIKKGILQTVKVVDELVKVMGRHKPENIVIEMARENQTTQKGQKNSRERMKRIEEGIKELGSQILKEHPVENTQLQNEKLYLYYLQNGRDMYVDQELDINRLSDYDVDHIVPQSFLKDDSIDNKVLTRSDKNRGKSDNVPSEEVVKKMKNYWRQLLNAKLITQRKFDNLTKAERGGLSELDKAGFIKRQLVETRQITKHVAQILDSRMNTKYDENDKLIREVKVITLKSKLVSDFRKDFQFYKVREINNYHHAHDAYLNAVVGTALIKKYPKLESEFVYGDYKVYDVRKMIAKSEQEIGKATAKYFFYSNIMNFFKTEITLANGEIRKRPLIETNGETGEIVWDKGRDFATVRKVLSMPQVNIVKKTEVQTGGFSKESILPKRNSDKLIARKKDWDPKKYGGFDSPTVAYSVLVVAKVEKGKSKKLKSVKELLGITIMERSSFEKNPIDFLEAKGYKEVKKDLIIKLPKYSLFELENGRKRMLASAGELQKGNELALPSKYVNFLYLASHYEKLKGSPGSSGSSGSETPGTSESATPESGSSSGSEVEFSHEYWMRHALTLAKRARDEREVPVGAVLVLNNRVIGEGWNRAIGLHDPTAHAEIMALRQGGLVMQNYRLIDATLYVTFEPCVMCAGAMIHSRIGRVVFGVRNAKTGAAGSLMDVLHYPGMNHRVEITEGILADECAALLCYFFRMRREDNEQKQLFVEQHKHYLDEIIEQISEFSKRVILADANLDKVLSAYNKHRDKPIREQAENIIHLFTLTNLGAPAAFKYFDTTIDRKRYTSTKEVLDATLIHQSITGLYETRIDLSQLGGD

SEQ ID NO: 276 - protein, 1546 aa, synthetic construct
  REGION 1..1546: note = 110.5 Cas9 TadAins 1249 polypeptide sequence
MDKKYSIGLAIGTNSVGWAVITDEYKVPSKKFKVLGNTDRHSIKKNLIGALLFDSGETAEATRLKRTARRRYTRRKNRICYLQEIFSNEMAKVDDSFFHRLEESFLVEEDKKHERHPIFGNIVDEVAYHEKYPTIYHLRKKLVDSTDKADLRLIYLALAHMIKFRGHFLIEGDLNPDNSDVDKLFIQLVQTYNQLFEENPINASGVDAKAILSARLSKSRRLENLIAQLPGEKKNGLFGNLIALSLGLTPNFKSNFDLAEDAKLQLSKDTYDDDLDNLLAQIGDQYADLFLAAKNLSDAILLSDILRVNTEITKAPLSASMIKRYDEHHQDLTLLKALVRQQLPEKYKEIFFDQSKNGYAGYIDGGASQEEFYKFIKPILEKMDGTEELLVKLNREDLLRKQRTFDNGSIPHQIHLGELHAILRRQEDFYPFLKDNREKIEKILTFRIPYYVGPLARGNSRFAWMTRKSEETITPWNFEEVVDKGASAQSFIERMTNFDKNLPNEKVLPKHSLLYEYFTVYNELTKVKYVTEGMRKPAFLSGEQKKAIVDLLFKTNRKVTVKQLKEDYFKKIECFDSVEISGVEDRFNASLGTYHDLLKIIKDKDFLDNEENEDILEDIVLTLTLFEDREMIEERLKTYAHLFDDKVMKQLKRRRYTGWGRLSRKLINGIRDKQSGKTILDFLKSDGFANRNFMQLIHDDSLTFKEDIQKAQVSGQGDSLHEHIANLAGSPAIKKGILQTVKVVDELVKVMGRHKPENIVIEMARENQTTQKGQKNSRERMKRIEEGIKELGSQILKEHPVENTQLQNEKLYLYYLQNGRDMYVDQELDINRLSDYDVDHIVPQSFLKDDSIDNKVLTRSDKNRGKSDNVPSEEVVKKMKNYWRQLLNAKLITQRKFDNLTKAERGGLSELDKAGFIKRQLVETRQITKHVAQILDSRMNTKYDENDKLIREVKVITLKSKLVSDFRKDFQFYKVREINNYHHAHDAYLNAVVGTALIKKYPKLESEFVYGDYKVYDVRKMIAKSEQEIGKATAKYFFYSNIMNFFKTEITLANGEIRKRPLIETNGETGEIVWDKGRDFATVRKVLSMPQVNIVKKTEVQTGGFSKESILPKRNSDKLIARKKDWDPKKYGGFDSPTVAYSVLVVAKVEKGKSKKLKSVKELLGITIMERSSFEKNPIDFLEAKGYKEVKKDLIIKLPKYSLFELENGRKRMLASAGELQKGNELALPSKYVNFLYLASHYEKLKGSGSSGSSGSETPGTSESATPESGSSSGSEVEFSHEYWMRHALTLAKRARDEREVPVGAVLVLNNRVIGEGWNRAIGLHDPTAHAEIMALRQGGLVMQNYRLIDATLYVTFEPCVMCAGAMIHSRIGRVVFGVRNAKTGAAGSLMDVLHYPGMNHRVEITEGILADECAALLCYFFRMRRPEDNEQKQLFVEQHKHYLDEIIEQISEFSKRVILADANLDKVLSAYNKHRDKPIREQAENIIHLFTLTNLGAPAAFKYFDTTIDRKRYTSTKEVLDATLIHQSITGLYETRIDLSQLGGD

SEQ ID NO: 277 - protein, 1551 aa, synthetic construct
  REGION 1..1551: note = 110.5 Cas9 TadAins delta59-66 1250 polypeptide sequence
MDKKYSIGLAIGTNSVGWAVITDEYKVPSKKFKVLGNTDRHSIKKNLIGALLFDSGETAEATRLKRTARRRYTRRKNRICYLQEIFSNEMAKVDDSFFHRLEESFLVEEDKKHERHPIFGNIVDEVAYHEKYPTIYHLRKKLVDSTDKADLRLIYLALAHMIKFRGHFLIEGDLNPDNSDVDKLFIQLVQTYNQLFEENPINASGVDAKAILSARLSKSRRLENLIAQLPGEKKNGLFGNLIALSLGLTPNFKSNFDLAEDAKLQLSKDTYDDDLDNLLAQIGDQYADLFLAAKNLSDAILLSDILRVNTEITKAPLSASMIKRYDEHHQDLTLLKALVRQQLPEKYKEIFFDQSKNGYAGYIDGGASQEEFYKFIKPILEKMDGTEELLVKLNREDLLRKQRTFDNGSIPHQIHLGELHAILRRQEDFYPFLKDNREKIEKILTFRIPYYVGPLARGNSRFAWMTRKSEETITPWNFEEVVDKGASAQSFIERMTNFDKNLPNEKVLPKHSLLYEYFTVYNELTKVKYVTEGMRKPAFLSGEQKKAIVDLLFKTNRKVTVKQLKEDYFKKIECFDSVEISGVEDRFNASLGTYHDLLKIIKDKDFLDNEENEDILEDIVLTLTLFEDREMIEERLKTYAHLFDDKVMKQLKRRRYTGWGRLSRKLINGIRDKQSGKTILDFLKSDGFANRNFMQLIHDDSLTFKEDIQKAQVSGQGDSLHEHIANLAGSPAIKKGILQTVKVVDELVKVMGRHKPENIVIEMARENQTTQKGQKNSRERMKRIEEGIKELGSQILKEHPVENTQLQNEKLYLYYLQNGRDMYVDQELDINRLSDYDVDHIVPQSFLKDDSIDNKVLTRSDKNRGKSDNVPSEEVVKKMKNYWRQLLNAKLITQRKFDNLTKAERGGLSELDKAGFIKRQLVETRQITKHVAQILDSRMNTKYDENDKLIREVKVITLKSKLVSDFRKDFQFYKVREINNYHHAHDAYLNAVVGTALIKKYPKLESEFVYGDYKVYDVRKMIAKSEQEIGKATAKYFFYSNIMNFFKTEITLANGEIRKRPLIETNGETGEIVWDKGRDFATVRKVLSMPQVNIVKKTEVQTGGFSKESILPKRNSDKLIARKKDWDPKKYGGFDSPTVAYSVLVVAKVEKGKSKKLKSVKELLGITIMERSSFEKNPIDFLEAKGYKEVKKDLIIKLPKYSLFELENGRKRMLASAGELQKGNELALPSKYVNFLYLASHYEKLKGSPGSSGSSGSETPGTSESATPESGSSGSEVEFSHEYWMRHALTLAKRARDEREVPVGAVLVLNNRVIGEGWNRAHAEIMALRQGGLVMQNYRLIDATLYVTFEPCVMCAGAMIHSRIGRVVFGVRNAKTGAAGSLMDVLHYPGMNHRVEITEGILADECAALLCYFFRMPRQVFNAQKKAQSSTDEDNEQKQLFVEQHKHYLDEIIEQISEFSKRVILADANLDKVLSAYNKHRDKPIREQAENIIHLFTLTNLGAPAAFKYFDTTIDRKRYTSTKEVLDATLIHQSITGLYETRIDLSQLGGD

SEQ ID NO: 278 - protein, 1546 aa, synthetic construct
  REGION 1..1546: note = 110.6 Cas9 TadAins 1251 polypeptide sequence
MDKKYSIGLAIGTNSVGWAVITDEYKVPSKKFKVLGNTDRHSIKKNLIGALLFDSGETAEATRLKRTARRRYTRRKNRICYLQEIFSNEMAKVDDSFFHRLEESFLVEEDKKHERHPIFGNIVDEVAYHEKYPTIYHLRKKLVDSTDKADLRLIYLALAHMIKFRGHFLIEGDLNPDNSDVDKLFIQLVQTYNQLFEENPINASGVDAKAILSARLSKSRRLENLIAQLPGEKKNGLFGNLIALSLGLTPNFKSNFDLAEDAKLQLSKDTYDDDLDNLLAQIGDQYADLFLAAKNLSDAILLSDILRVNTEITKAPLSASMIKRYDEHHQDLTLLKALVRQQLPEKYKEIFFDQSKNGYAGYIDGGASQEEFYKFIKPILEKMDGTEELLVKLNREDLLRKQRTFDNGSIPHQIHLGELHAILRRQEDFYPFLKDNREKIEKILTFRIPYYVGPLARGNSRFAWMTRKSEETITPWNFEEVVDKGASAQSFIERMTNFDKNLPNEKVLPKHSLLYEYFTVYNELTKVKYVTEGMRKPAFLSGEQKKAIVDLLFKTNRKVTVKQLKEDYFKKIECFDSVEISGVEDRFNASLGTYHDLLKIIKDKDFLDNEENEDILEDIVLTLTLFEDREMIEERLKTYAHLFDDKVMKQLKRRRYTGWGRLSRKLINGIRDKQSGKTILDFLKSDGFANRNFMQLIHDDSLTFKEDIQKAQVSGQGDSLHEHIANLAGSPAIKKGILQTVKVVDELVKVMGRHKPENIVIEMARENQTTQKGQKNSRERMKRIEEGIKELGSQILKEHPVENTQLQNEKLYLYYLQNGRDMYVDQELDINRLSDYDVDHIVPQSFLKDDSIDNKVLTRSDKNRGKSDNVPSEEVVKKMKNYWRQLLNAKLITQRKFDNLTKAERGGLSELDKAGFIKRQLVETRQITKHVAQILDSRMNTKYDENDKLIREVKVITLKSKLVSDFRKDFQFYKVREINNYHHAHDAYLNAVVGTALIKKYPKLESEFVYGDYKVYDVRKMIAKSEQEIGKATAKYFFYSNIMNFFKTEITLANGEIRKRPLIETNGETGEIVWDKGRDFATVRKVLSMPQVNIVKKTEVQTGGFSKESILPKRNSDKLIARKKDWDPKKYGGFDSPTVAYSVLVVAKVEKGKSKKLKSVKELLGITIMERSSFEKNPIDFLEAKGYKEVKKDLIIKLPKYSLFELENGRKRMLASAGELQKGNELALPSKYVNFLYLASHYEKLKGSPEGSSGSSGSETPGTSESATPESGSSSGSEVEFSHEYWMRHALTLAKRARDEREVPVGAVLVLNNRVIGEGWNRAIGLHDPTAHAEIMALRQGGLVMQNYRLIDATLYVTFEPCVMCAGAMIHSRIGRVVFGVRNAKTGAAGSLMDVLHYPGMNHRVEITEGILADECAALLCYFFRMRRDNEQKQLFVEQHKHYLDEIIEQISEFSKRVILADANLDKVLSAYNKHRDKPIREQAENIIHLFTLTNLGAPAAFKYFDTTIDRKRYTSTKEVLDATLIHQSITGLYETRIDLSQLGGD

SEQ ID NO: 279 - protein, 1546 aa, synthetic construct
  REGION 1..1546: note = 110.7 Cas9 TadAins 1252 polypeptide sequence
MDKKYSIGLAIGTNSVGWAVITDEYKVPSKKFKVLGNTDRHSIKKNLIGALLFDSGETAEATRLKRTARRRYTRRKNRICYLQEIFSNEMAKVDDSFFHRLEESFLVEEDKKHERHPIFGNIVDEVAYHEKYPTIYHLRKKLVDSTDKADLRLIYLALAHMIKFRGHFLIEGDLNPDNSDVDKLFIQLVQTYNQLFEENPINASGVDAKAILSARLSKSRRLENLIAQLPGEKKNGLFGNLIALSLGLTPNFKSNFDLAEDAKLQLSKDTYDDDLDNLLAQIGDQYADLFLAAKNLSDAILLSDILRVNTEITKAPLSASMIKRYDEHHQDLTLLKALVRQQLPEKYKEIFFDQSKNGYAGYIDGGASQEEFYKFIKPILEKMDGTEELLVKLNREDLLRKQRTFDNGSIPHQIHLGELHAILRRQEDFYPFLKDNREKIEKILTFRIPYYVGPLARGNSRFAWMTRKSEETITPWNFEEVVDKGASAQSFIERMTNFDKNLPNEKVLPKHSLLYEYFTVYNELTKVKYVTEGMRKPAFLSGEQKKAIVDLLFKTNRKVTVKQLKEDYFKKIECFDSVEISGVEDRFNASLGTYHDLLKIIKDKDFLDNEENEDILEDIVLTLTLFEDREMIEERLKTYAHLFDDKVMKQLKRRRYTGWGRLSRKLINGIRDKQSGKTILDFLKSDGFANRNFMQLIHDDSLTFKEDIQKAQVSGQGDSLHEHIANLAGSPAIKKGILQTVKVVDELVKVMGRHKPENIVIEMARENQTTQKGQKNSRERMKRIEEGIKELGSQILKEHPVENTQLQNEKLYLYYLQNGRDMYVDQELDINRLSDYDVDHIVPQSFLKDDSIDNKVLTRSDKNRGKSDNVPSEEVVKKMKNYWRQLLNAKLITQRKFDNLTKAERGGLSELDKAGFIKRQLVETRQITKHVAQILDSRMNTKYDENDKLIREVKVITLKSKLVSDFRKDFQFYKVREINNYHHAHDAYLNAVVGTALIKKYPKLESEFVYGDYKVYDVRKMIAKSEQEIGKATAKYFFYSNIMNFFKTEITLANGEIRKRPLIETNGETGEIVWDKGRDFATVRKVLSMPQVNIVKKTEVQTGGFSKESILPKRNSDKLIARKKDWDPKKYGGFDSPTVAYSVLVVAKVEKGKSKKLKSVKELLGITIMERSSFEKNPIDFLEAKGYKEVKKDLIIKLPKYSLFELENGRKRMLASAGELQKGNELALPSKYVNFLYLASHYEKLKGSPEDGSSGSSGSETPGTSESATPESGSSSGSEVEFSHEYWMRHALTLAKRARDEREVPVGAVLVLNNRVIGEGWNRAIGLHDPTAHAEIMALRQGGLVMQNYRLIDATLYVTFEPCVMCAGAMIHSRIGRVVFGVRNAKTGAAGSLMDVLHYPGMNHRVEITEGILADECAALLCYFFRMRRNEQKQLFVEQHKHYLDEIIEQISEFSKRVILADANLDKVLSAYNKHRDKPIREQAENIIHLFTLTNLGAPAAFKYFDTTIDRKRYTSTKEVLDATLIHQSITGLYETRIDLSQLGGD

SEQ ID NO: 280 - protein, 1533 aa, synthetic construct
  REGION 1..1533: note = 110.8 Cas9 TadAins delta59-66 C-truncate 1250 polypeptide sequence
MDKKYSIGLAIGTNSVGWAVITDEYKVPSKKFKVLGNTDRHSIKKNLIGALLFDSGETAEATRLKRTARRRYTRRKNRICYLQEIFSNEMAKVDDSFFHRLEESFLVEEDKKHERHPIFGNIVDEVAYHEKYPTIYHLRKKLVDSTDKADLRLIYLALAHMIKFRGHFLIEGDLNPDNSDVDKLFIQLVQTYNQLFEENPINASGVDAKAILSARLSKSRRLENLIAQLPGEKKNGLFGNLIALSLGLTPNFKSNFDLAEDAKLQLSKDTYDDDLDNLLAQIGDQYADLFLAAKNLSDAILLSDILRVNTEITKAPLSASMIKRYDEHHQDLTLLKALVRQQLPEKYKEIFFDQSKNGYAGYIDGGASQEEFYKFIKPILEKMDGTEELLVKLNREDLLRKQRTFDNGSIPHQIHLGELHAILRRQEDFYPFLKDNREKIEKILTFRIPYYVGPLARGNSRFAWMTRKSEETITPWNFEEVVDKGASAQSFIERMTNFDKNLPNEKVLPKHSLLYEYFTVYNELTKVKYVTEGMRKPAFLSGEQKKAIVDLLFKTNRKVTVKQLKEDYFKKIECFDSVEISGVEDRFNASLGTYHDLLKIIKDKDFLDNEENEDILEDIVLTLTLFEDREMIEERLKTYAHLFDDKVMKQLKRRRYTGWGRLSRKLINGIRDKQSGKTILDFLKSDGFANRNFMQLIHDDSLTFKEDIQKAQVSGQGDSLHEHIANLAGSPAIKKGILQTVKVVDELVKVMGRHKPENIVIEMARENQTTQKGQKNSRERMKRIEEGIKELGSQILKEHPVENTQLQNEKLYLYYLQNGRDMYVDQELDINRLSDYDVDHIVPQSFLKDDSIDNKVLTRSDKNRGKSDNVPSEEVVKKMKNYWRQLLNAKLITQRKFDNLTKAERGGLSELDKAGFIKRQLVETRQITKHVAQILDSRMNTKYDENDKLIREVKVITLKSKLVSDFRKDFQFYKVREINNYHHAHDAYLNAVVGTALIKKYPKLESEFVYGDYKVYDVRKMIAKSEQEIGKATAKYFFYSNIMNFFKTEITLANGEIRKRPLIETNGETGEIVWDKGRDFATVRKVLSMPQVNIVKKTEVQTGGFSKESILPKRNSDKLIARKKDWDPKKYGGFDSPTVAYSVLVVAKVEKGKSKKLKSVKELLGITIMERSSFEKNPIDFLEAKGYKEVKKDLIIKLPKYSLFELENGRKRMLASAGELQKGNELALPSKYVNFLYLASHYEKLKGSPGSSGSETPGTSESATPESSGSEVEFSHEYWMRHALTLAKRARDEREVPVGAVLVLNNRVIGEGWNRAHAEIMALRQGGLVMQNYRLIDATLYVTFEPCVMCAGAMIHSRIGRVVFGVRNAKTGAAGSLMDVLHYPGMNHRVEITEGILADECAALLCYFFRMPRQEDNEQKQLFVEQHKHYLDEIIEQISEFSKRVILADANLDKVLSAYNKHRDKPIREQAENIIHLFTLTNLGAPAAFKYFDTTIDRKRYTSTKEVLDATLIHQSITGLYETRIDLSQLGGD

SEQ ID NO: 281 - protein, 1549 aa, synthetic construct
  REGION 1..1549: note = 111.1 Cas9 TadAins 997 polypeptide sequence
MDKKYSIGLAIGTNSVGWAVITDEYKVPSKKFKVLGNTDRHSIKKNLIGALLFDSGETAEATRLKRTARRRYTRRKNRICYLQEIFSNEMAKVDDSFFHRLEESFLVEEDKKHERHPIFGNIVDEVAYHEKYPTIYHLRKKLVDSTDKADLRLIYLALAHMIKFRGHFLIEGDLNPDNSDVDKLFIQLVQTYNQLFEENPINASGVDAKAILSARLSKSRRLENLIAQLPGEKKNGLFGNLIALSLGLTPNFKSNFDLAEDAKLQLSKDTYDDDLDNLLAQIGDQYADLFLAAKNLSDAILLSDILRVNTEITKAPLSASMIKRYDEHHQDLTLLKALVRQQLPEKYKEIFFDQSKNGYAGYIDGGASQEEFYKFIKPILEKMDGTEELLVKLNREDLLRKQRTFDNGSIPHQIHLGELHAILRRQEDFYPFLKDNREKIEKILTFRIPYYVGPLARGNSRFAWMTRKSEETITPWNFEEVVDKGASAQSFIERMTNFDKNLPNEKVLPKHSLLYEYFTVYNELTKVKYVTEGMRKPAFLSGEQKKAIVDLLFKTNRKVTVKQLKEDYFKKIECFDSVEISGVEDRFNASLGTYHDLLKIIKDKDFLDNEENEDILEDIVLTLTLFEDREMIEERLKTYAHLFDDKVMKQLKRRRYTGWGRLSRKLINGIRDKQSGKTILDFLKSDGFANRNFMQLIHDDSLTFKEDIQKAQVSGQGDSLHEHIANLAGSPAIKKGILQTVKVVDELVKVMGRHKPENIVIEMARENQTTQKGQKNSRERMKRIEEGIKELGSQILKEHPVENTQLQNEKLYLYYLQNGRDMYVDQELDINRLSDYDVDHIVPQSFLKDDSIDNKVLTRSDKNRGKSDNVPSEEVVKKMKNYWRQLLNAKLITQRKFDNLTKAERGGLSELDKAGFIKRQLVETRQITKHVAQILDSRMNTKYDENDKLIREVKVITLKSKLVSDFRKDFQFYKVREINNYHHAHDAYLNAVVGTALSHEYWMRHALTLAKRARDEREVPVGAVLVLNNRVIGEGWNRAIGLHDPTAHAEIMALRQGGLVMQNYRLIDATLYVTFEPCVMCAGAMIHSRIGRVVFGVRNAKTGAAGSLMDVLHYPGMNHRVEITEGILADECAALLCYFFRMPRQVFNAQKKAQSSTDGSSGSETPGTSESATPESSGIKKYPKLESEFVYGDYKVYDVRKMIAKSEQEIGKATAKYFFYSNIMNFFKTEITLANGEIRKRPLIETNGETGEIVWDKGRDFATVRKVLSMPQVNIVKKTEVQTGGFSKESILPKRNSDKLIARKKDWDPKKYGGFDSPTVAYSVLVVAKVEKGKSKKLKSVKELLGITIMERSSFEKNPIDFLEAKGYKEVKKDLIIKLPKYSLFELENGRKRMLASAGELQKGNELALPSKYVNFLYLASHYEKLKGSPEDNEQKQLFVEQHKHYLDEIIEQISEFSKRVILADANLDKVLSAYNKHRDKPIREQAENIIHLFTLTNLGAPAAFKYFDTTIDRKRYTSTKEVLDATLIHQSITGLYETRIDLSQLGGD

SEQ ID NO: 282 - protein, 1555 aa, synthetic construct
  REGION 1..1555: note = 111.2 Cas9 TadAins 997 polypeptide sequence
MDKKYSIGLAIGTNSVGWAVITDEYKVPSKKFKVLGNTDRHSIKKNLIGALLFDSGETAEATRLKRTARRRYTRRKNRICYLQEIFSNEMAKVDDSFFHRLEESFLVEEDKKHERHPIFGNIVDEVAYHEKYPTIYHLRKKLVDSTDKADLRLIYLALAHMIKFRGHFLIEGDLNPDNSDVDKLFIQLVQTYNQLFEENPINASGVDAKAILSARLSKSRRLENLIAQLPGEKKNGLFGNLIALSLGLTPNFKSNFDLAEDAKLQLSKDTYDDDLDNLLAQIGDQYADLFLAAKNLSDAILLSDILRVNTEITKAPLSASMIKRYDEHHQDLTLLKALVRQQLPEKYKEIFFDQSKNGYAGYIDGGASQEEFYKFIKPILEKMDGTEELLVKLNREDLLRKQRTFDNGSIPHQIHLGELHAILRRQEDFYPFLKDNREKIEKILTFRIPYYVGPLARGNSRFAWMTRKSEETITPWNFEEVVDKGASAQSFIERMTNFDKNLPNEKVLPKHSLLYEYFTVYNELTKVKYVTEGMRKPAFLSGEQKKAIVDLLFKTNRKVTVKQLKEDYFKKIECFDSVEISGVEDRFNASLGTYHDLLKIIKDKDFLDNEENEDILEDIVLTLTLFEDREMIEERLKTYAHLFDDKVMKQLKRRRYTGWGRLSRKLINGIRDKQSGKTILDFLKSDGFANRNFMQLIHDDSLTFKEDIQKAQVSGQGDSLHEHIANLAGSPAIKKGILQTVKVVDELVKVMGRHKPENIVIEMARENQTTQKGQKNSRERMKRIEEGIKELGSQILKEHPVENTQLQNEKLYLYYLQNGRDMYVDQELDINRLSDYDVDHIVPQSFLKDDSIDNKVLTRSDKNRGKSDNVPSEEVVKKMKNYWRQLLNAKLITQRKFDNLTKAERGGLSELDKAGFIKRQLVETRQITKHVAQILDSRMNTKYDENDKLIREVKVITLKSKLVSDFRKDFQFYKVREINNYHHAHDAYLNAVVGTALSHEYWMRHALTLAKRARDEREVPVGAVLVLNNRVIGEGWNRAIGLHDPTAHAEIMALRQGGLVMQNYRLIDATLYVTFEPCVMCAGAMIHSRIGRVVFGVRNAKTGAAGSLMDVLHYPGMNHRVEITEGILADECAALLCYFFRMPRQVFNAQKKAQSSTDGSSGSSGSETPGTSESATPESSGGSSIKKYPKLESEFVYGDYKVYDVRKMIAKSEQEIGKATAKYFFYSNIMNFFKTEITLANGEIRKRPLIETNGETGEIVWDKGRDFATVRKVLSMPQVNIVKKTEVQTGGFSKESILPKRNSDKLIARKKDWDPKKYGGFDSPTVAYSVLVVAKVEKGKSKKLKSVKELLGITIMERSSFEKNPIDFLEAKGYKEVKKDLIIKLPKYSLFELENGRKRMLASAGELQKGNELALPSKYVNFLYLASHYEKLKGSPEDNEQKQLFVEQHKHYLDEIIEQISEFSKRVILADANLDKVLSAYNKHRDKPIREQAENIIHLFTLTNLGAPAAFKYFDTTIDRKRYTSTKEVLDATLIHQSITGLYETRIDLSQLGGD

SEQ ID NO: 283 - protein, 1421 aa, synthetic construct
  REGION 1..1421: note = 112 delta HNH TadA polypeptide sequence
MDKKYSIGLAIGTNSVGWAVITDEYKVPSKKFKVLGNTDRHSIKKNLIGALLFDSGETAEATRLKRTARRRYTRRKNRICYLQEIFSNEMAKVDDSFFHRLEESFLVEEDKKHERHPIFGNIVDEVAYHEKYPTIYHLRKKLVDSTDKADLRLIYLALAHMIKFRGHFLIEGDLNPDNSDVDKLFIQLVQTYNQLFEENPINASGVDAKAILSARLSKSRRLENLIAQLPGEKKNGLFGNLIALSLGLTPNFKSNFDLAEDAKLQLSKDTYDDDLDNLLAQIGDQYADLFLAAKNLSDAILLSDILRVNTEITKAPLSASMIKRYDEHHQDLTLLKALVRQQLPEKYKEIFFDQSKNGYAGYIDGGASQEEFYKFIKPILEKMDGTEELLVKLNREDLLRKQRTFDNGSIPHQIHLGELHAILRRQEDFYPFLKDNREKIEKILTFRIPYYVGPLARGNSRFAWMTRKSEETITPWNFEEVVDKGASAQSFIERMTNFDKNLPNEKVLPKHSLLYEYFTVYNELTKVKYVTEGMRKPAFLSGEQKKAIVDLLFKTNRKVTVKQLKEDYFKKIECFDSVEISGVEDRFNASLGTYHDLLKIIKDKDFLDNEENEDILEDIVLTLTLFEDREMIEERLKTYAHLFDDKVMKQLKRRRYTGWGRLSRKLINGIRDKQSGKTILDFLKSDGFANRNFMQLIHDDSLTFKEDIQKAQVSGQGDSLHEHIANLAGSPAIKKGILQTVKVVDELVKVMGRHKPENIVIEMARENQTTQKGQKNSRERMKRIEEGIKELGSEVEFSHEYWMRHALTLAKRARDEREVPVGAVLVLNNRVIGEGWNRAIGLHDPTAHAEIMALRQGGLVMQNYRLIDATLYVTFEPCVMCAGAMIHSRIGRVVFGVRNAKTGAAGSLMDVLHYPGMNHRVEITEGILADECAALLCYFFRMPRQVFNAQKKAQSSTDGGLSELDKAGFIKRQLVETRQITKHVAQILDSRMNTKYDENDKLIREVKVITLKSKLVSDFRKDFQFYKVREINNYHHAHDAYLNAVVGTALIKKYPKLESEFVYGDYKVYDVRKMIAKSEQEIGKATAKYFFYSNIMNFFKTEITLANGEIRKRPLIETNGETGEIVWDKGRDFATVRKVLSMPQVNIVKKTEVQTGGFSKESILPKRNSDKLIARKKDWDPKKYGGFDSPTVAYSVLVVAKVEKGKSKKLKSVKELLGITIMERSSFEKNPIDFLEAKGYKEVKKDLIIKLPKYSLFELENGRKRMLASAGELQKGNELALPSKYVNFLYLASHYEKLKGSPEDNEQKQLFVEQHKHYLDEIIEQISEFSKRVILADANLDKVLSAYNKHRDKPIREQAENIIHLFTLTNLGAPAAFKYFDTTIDRKRYTSTKEVLDATLIHQSITGLYETRIDLSQLGGD

SEQ ID NO: 284 - protein, 1552 aa, synthetic construct
  REGION 1..1552: note = 113 N-term single TadA helixtrunc 165-end polypeptide sequence
MSEVEFSHEYWMRHALTLAKRARDEREVPVGAVLVLNNRVIGEGWNRAIGLHDPTAHAEIMALRQGGLVMQNYRLIDATLYVTFEPCVMCAGAMIHSRIGRVVFGVRNAKTGAAGSLMDVLHYPGMNHRVEITEGILADECAALLCYFFRMPRSGGSSGGSSGSETPGTSESATPESSGGSSGGSDKKYSIGLAIGTNSVGWAVITDEYKVPSKKFKVLGNTDRHSIKKNLIGALLFDSGETAEATRLKRTARRRYTRRKNRICYLQEIFSNEMAKVDDSFFHRLEESFLVEEDKKHERHPIFGNIVDEVAYHEKYPTIYHLRKKLVDSTDKADLRLIYLALAHMIKFRGHFLIEGDLNPDNSDVDKLFIQLVQTYNQLFEENPINASGVDAKAILSARLSKSRRLENLIAQLPGEKKNGLFGNLIALSLGLTPNFKSNFDLAEDAKLQLSKDTYDDDLDNLLAQIGDQYADLFLAAKNLSDAILLSDILRVNTEITKAPLSASMIKRYDEHHQDLTLLKALVRQQLPEKYKEIFFDQSKNGYAGYIDGGASQEEFYKFIKPILEKMDGTEELLVKLNREDLLRKQRTFDNGSIPHQIHLGELHAILRRQEDFYPFLKDNREKIEKILTFRIPYYVGPLARGNSRFAWMTRKSEETITPWNFEEVVDKGASAQSFIERMTNFDKNLPNEKVLPKHSLLYEYFTVYNELTKVKYVTEGMRKPAFLSGEQKKAIVDLLFKTNRKVTVKQLKEDYFKKIECFDSVEISGVEDRFNASLGTYHDLLKIIKDKDFLDNEENEDILEDIVLTLTLFEDREMIEERLKTYAHLFDDKVMKQLKRRRYTGWGRLSRKLINGIRDKQSGKTILDFLKSDGFANRNFMQLIHDDSLTFKEDIQKAQVSGQGDSLHEHIANLAGSPAIKKGILQTVKVVDELVKVMGRHKPENIVIEMARENQTTQKGQKNSRERMKRIEEGIKELGSQILKEHPVENTQLQNEKLYLYYLQNGRDMYVDQELDINRLSDYDVDHIVPQSFLKDDSIDNKVLTRSDKNRGKSDNVPSEEVVKKMKNYWRQLLNAKLITQRKFDNLTKAERGGLSELDKAGFIKRQLVETRQITKHVAQILDSRMNTKYDENDKLIREVKVITLKSKLVSDFRKDFQFYKVREINNYHHAHDAYLNAVVGTALIKKYPKLESEFVYGDYKVYDVRKMIAKSEQEIGKATAKYFFYSNIMNFFKTEITLANGEIRKRPLIETNGETGEIVWDKGRDFATVRKVLSMPQVNIVKKTEVQTGGFSKESILPKRNSDKLIARKKDWDPKKYGGFDSPTVAYSVLVVAKVEKGKSKKLKSVKELLGITIMERSSFEKNPIDFLEAKGYKEVKKDLIIKLPKYSLFELENGRKRMLASAGELQKGNELALPSKYVNFLYLASHYEKLKGSPEDNEQKQLFVEQHKHYLDEIIEQISEFSKRVILADANLDKVLSAYNKHRDKPIREQAENIIHLFTLTNLGAPAAFKYFDTTIDRKRYTSTKEVLDATLIHQSITGLYETRIDLSQLGGD

SEQ ID NO: 285 - protein, 1545 aa, synthetic construct
  REGION 1..1545: note = 114 N-term single TadA helixtrunc 165-end delta 59-65 polypeptide sequence
MSEVEFSHEYWMRHALTLAKRARDEREVPVGAVLVLNNRVIGEGWNRTAHAEIMALRQGGLVMQNYRLIDATLYVTFEPCVMCAGAMIHSRIGRVVFGVRNAKTGAAGSLMDVLHYPGMNHRVEITEGILADECAALLCYFFRMPRSGGSSGGSSGSETPGTSESATPESSGGSSGGSDKKYSIGLAIGTNSVGWAVITDEYKVPSKKFKVLGNTDRHSIKKNLIGALLFDSGETAEATRLKRTARRRYTRRKNRICYLQEIFSNEMAKVDDSFFHRLEESFLVEEDKKHERHPIFGNIVDEVAYHEKYPTIYHLRKKLVDSTDKADLRLIYLALAHMIKFRGHFLIEGDLNPDNSDVDKLFIQLVQTYNQLFEENPINASGVDAKAILSARLSKSRRLENLIAQLPGEKKNGLFGNLIALSLGLTPNFKSNFDLAEDAKLQLSKDTYDDDLDNLLAQIGDQYADLFLAAKNLSDAILLSDILRVNTEITKAPLSASMIKRYDEHHQDLTLLKALVRQQLPEKYKEIFFDQSKNGYAGYIDGGASQEEFYKFIKPILEKMDGTEELLVKLNREDLLRKQRTFDNGSIPHQIHLGELHAILRRQEDFYPFLKDNREKIEKILTFRIPYYVGPLARGNSRFAWMTRKSEETITPWNFEEVVDKGASAQSFIERMTNFDKNLPNEKVLPKHSLLYEYFTVYNELTKVKYVTEGMRKPAFLSGEQKKAIVDLLFKTNRKVTVKQLKEDYFKKIECFDSVEISGVEDRFNASLGTYHDLLKIIKDKDFLDNEENEDILEDIVLTLTLFEDREMIEERLKTYAHLFDDKVMKQLKRRRYTGWGRLSRKLINGIRDKQSGKTILDFLKSDGFANRNFMQLIHDDSLTFKEDIQKAQVSGQGDSLHEHIANLAGSPAIKKGILQTVKVVDELVKVMGRHKPENIVIEMARENQTTQKGQKNSRERMKRIEEGIKELGSQILKEHPVENTQLQNEKLYLYYLQNGRDMYVDQELDINRLSDYDVDHIVPQSFLKDDSIDNKVLTRSDKNRGKSDNVPSEEVVKKMKNYWRQLLNAKLITQRKFDNLTKAERGGLSELDKAGFIKRQLVETRQITKHVAQILDSRMNTKYDENDKLIREVKVITLKSKLVSDFRKDFQFYKVREINNYHHAHDAYLNAVVGTALIKKYPKLESEFVYGDYKVYDVRKMIAKSEQEIGKATAKYFFYSNIMNFFKTEITLANGEIRKRPLIETNGETGEIVWDKGRDFATVRKVLSMPQVNIVKKTEVQTGGFSKESILPKRNSDKLIARKKDWDPKKYGGFDSPTVAYSVLVVAKVEKGKSKKLKSVKELLGITIMERSSFEKNPIDFLEAKGYKEVKKDLIIKLPKYSLFELENGRKRMLASAGELQKGNELALPSKYVNFLYLASHYEKLKGSPEDNEQKQLFVEQHKHYLDEIIEQISEFSKRVILADANLDKVLSAYNKHRDKPIREQAENIIHLFTLTNLGAPAAFKYFDTTIDRKRYTSTKEVLDATLIHQSITGLYETRIDLSQLGGD

SEQ ID NO: 286 - protein, 1541 aa, synthetic construct
  REGION 1..1541: note = 115.1 Cas9 TadAins 1004 polypeptide sequence
MDKKYSIGLAIGTNSVGWAVITDEYKVPSKKFKVLGNTDRHSIKKNLIGALLFDSGETAEATRLKRTARRRYTRRKNRICYLQEIFSNEMAKVDDSFFHRLEESFLVEEDKKHERHPIFGNIVDEVAYHEKYPTIYHLRKKLVDSTDKADLRLIYLALAHMIKFRGHFLIEGDLNPDNSDVDKLFIQLVQTYNQLFEENPINASGVDAKAILSARLSKSRRLENLIAQLPGEKKNGLFGNLIALSLGLTPNFKSNFDLAEDAKLQLSKDTYDDDLDNLLAQIGDQYADLFLAAKNLSDAILLSDILRVNTEITKAPLSASMIKRYDEHHQDLTLLKALVRQQLPEKYKEIFFDQSKNGYAGYIDGGASQEEFYKFIKPILEKMDGTEELLVKLNREDLLRKQRTFDNGSIPHQIHLGELHAILRRQEDFYPFLKDNREKIEKILTFRIPYYVGPLARGNSRFAWMTRKSEETITPWNFEEVVDKGASAQSFIERMTNFDKNLPNEKVLPKHSLLYEYFTVYNELTKVKYVTEGMRKPAFLSGEQKKAIVDLLFKTNRKVTVKQLKEDYFKKIECFDSVEISGVEDRFNASLGTYHDLLKIIKDKDFLDNEENEDILEDIVLTLTLFEDREMIEERLKTYAHLFDDKVMKQLKRRRYTGWGRLSRKLINGIRDKQSGKTILDFLKSDGFANRNFMQLIHDDSLTFKEDIQKAQVSGQGDSLHEHIANLAGSPAIKKGILQTVKVVDELVKVMGRHKPENIVIEMARENQTTQKGQKNSRERMKRIEEGIKELGSQILKEHPVENTQLQNEKLYLYYLQNGRDMYVDQELDINRLSDYDVDHIVPQSFLKDDSIDNKVLTRSDKNRGKSDNVPSEEVVKKMKNYWRQLLNAKLITQRKFDNLTKAERGGLSELDKAGFIKRQLVETRQITKHVAQILDSRMNTKYDENDKLIREVKVITLKSKLVSDFRKDFQFYKVREINNYHHAHDAYLNAVVGTALIKKYPKGSSGSETPGTSESATPESSGSEVEFSHEYWMRHALTLAKRARDEREVPVGAVLVLNNRVIGEGWNRAIGLHDPTAHAEIMALRQGGLVMQNYRLIDATLYVTFEPCVMCAGAMIHSRIGRVVFGVRNAKTGAAGSLMDVLHYPGMNHRVEITEGILADECAALLCYFFRMPRQLESEFVYGDYKVYDVRKMIAKSEQEIGKATAKYFFYSNIMNFFKTEITLANGEIRKRPLIETNGETGEIVWDKGRDFATVRKVLSMPQVNIVKKTEVQTGGFSKESILPKRNSDKLIARKKDWDPKKYGGFDSPTVAYSVLVVAKVEKGKSKKLKSVKELLGITIMERSSFEKNPIDFLEAKGYKEVKKDLIIKLPKYSLFELENGRKRMLASAGELQKGNELALPSKYVNFLYLASHYEKLKGSPEDNEQKQLFVEQHKHYLDEIIEQISEFSKRVILADANLDKVLSAYNKHRDKPIREQAENIIHLFTLTNLGAPAAFKYFDTTIDRKRYTSTKEVLDATLIHQSITGLYETRIDLSQLGGD

SEQ ID NO: 287 - protein, 1541 aa, synthetic construct
  REGION 1..1541: note = 115.2 Cas9 TadAins 1005 polypeptide sequence
MDKKYSIGLAIGTNSVGWAVITDEYKVPSKKFKVLGNTDRHSIKKNLIGALLFDSGETAEATRLKRTARRRYTRRKNRICYLQEIFSNEMAKVDDSFFHRLEESFLVEEDKKHERHPIFGNIVDEVAYHEKYPTIYHLRKKLVDSTDKADLRLIYLALAHMIKFRGHFLIEGDLNPDNSDVDKLFIQLVQTYNQLFEENPINASGVDAKAILSARLSKSRRLENLIAQLPGEKKNGLFGNLIALSLGLTPNFKSNFDLAEDAKLQLSKDTYDDDLDNLLAQIGDQYADLFLAAKNLSDAILLSDILRVNTEITKAPLSASMIKRYDEHHQDLTLLKALVRQQLPEKYKEIFFDQSKNGYAGYIDGGASQEEFYKFIKPILEKMDGTEELLVKLNREDLLRKQRTFDNGSIPHQIHLGELHAILRRQEDFYPFLKDNREKIEKILTFRIPYYVGPLARGNSRFAWMTRKSEETITPWNFEEVVDKGASAQSFIERMTNFDKNLPNEKVLPKHSLLYEYFTVYNELTKVKYVTEGMRKPAFLSGEQKKAIVDLLFKTNRKVTVKQLKEDYFKKIECFDSVEISGVEDRFNASLGTYHDLLKIIKDKDFLDNEENEDILEDIVLTLTLFEDREMIEERLKTYAHLFDDKVMKQLKRRRYTGWGRLSRKLINGIRDKQSGKTILDFLKSDGFANRNFMQLIHDDSLTFKEDIQKAQVSGQGDSLHEHIANLAGSPAIKKGILQTVKVVDELVKVMGRHKPENIVIEMARENQTTQKGQKNSRERMKRIEEGIKELGSQILKEHPVENTQLQNEKLYLYYLQNGRDMYVDQELDINRLSDYDVDHIVPQSFLKDDSIDNKVLTRSDKNRGKSDNVPSEEVVKKMKNYWRQLLNAKLITQRKFDNLTKAERGGLSELDKAGFIKRQLVETRQITKHVAQILDSRMNTKYDENDKLIREVKVITLKSKLVSDFRKDFQFYKVREINNYHHAHDAYLNAVVGTALIKKYPKLGSSGSETPGTSESATPESSGSEVEFSHEYWMRHALTLAKRARDEREVPVGAVLVLNNRVIGEGWNRAIGLHDPTAHAEIMALRQGGLVMQNYRLIDATLYVTFEPCVMCAGAMIHSRIGRVVFGVRNAKTGAAGSLMDVLHYPGMNHRVEITEGILADECAALLCYFFRMPRQESEFVYGDYKVYDVRKMIAKSEQEIGKATAKYFFYSNIMNFFKTEITLANGEIRKRPLIETNGETGEIVWDKGRDFATVRKVLSMPQVNIVKKTEVQTGGFSKESILPKRNSDKLIARKKDWDPKKYGGFDSPTVAYSVLVVAKVEKGKSKKLKSVKELLGITIMERSSFEKNPIDFLEAKGYKEVKKDLIIKLPKYSLFELENGRKRMLASAGELQKGNELALPSKYVNFLYLASHYEKLKGSPEDNEQKQLFVEQHKHYLDEIIEQISEFSKRVILADANLDKVLSAYNKHRDKPIREQAENIIHLFTLTNLGAPAAFKYFDTTIDRKRYTSTKEVLDATLIHQSITGLYETRIDLSQLGGD

SEQ ID NO: 288 - protein, 1541 aa, synthetic construct
  REGION 1..1541: note = 115.3 Cas9 TadAins 1006 polypeptide sequence
MDKKYSIGLAIGTNSVGWAVITDEYKVPSKKFKVLGNTDRHSIKKNLIGALLFDSGETAEATRLKRTARRRYTRRKNRICYLQEIFSNEMAKVDDSFFHRLEESFLVEEDKKHERHPIFGNIVDEVAYHEKYPTIYHLRKKLVDSTDKADLRLIYLALAHMIKFRGHFLIEGDLNPDNSDVDKLFIQLVQTYNQLFEENPINASGVDAKAILSARLSKSRRLENLIAQLPGEKKNGLFGNLIALSLGLTPNFKSNFDLAEDAKLQLSKDTYDDDLDNLLAQIGDQYADLFLAAKNLSDAILLSDILRVNTEITKAPLSASMIKRYDEHHQDLTLLKALVRQQLPEKYKEIFFDQSKNGYAGYIDGGASQEEFYKFIKPILEKMDGTEELLVKLNREDLLRKQRTFDNGSIPHQIHLGELHAILRRQEDFYPFLKDNREKIEKILTFRIPYYVGPLARGNSRFAWMTRKSEETITPWNFEEVVDKGASAQSFIERMTNFDKNLPNEKVLPKHSLLYEYFTVYNELTKVKYVTEGMRKPAFLSGEQKKAIVDLLFKTNRKVTVKQLKEDYFKKIECFDSVEISGVEDRFNASLGTYHDLLKIIKDKDFLDNEENEDILEDIVLTLTLFEDREMIEERLKTYAHLFDDKVMKQLKRRRYTGWGRLSRKLINGIRDKQSGKTILDFLKSDGFANRNFMQLIHDDSLTFKEDIQKAQVSGQGDSLHEHIANLAGSPAIKKGILQTVKVVDELVKVMGRHKPENIVIEMARENQTTQKGQKNSRERMKRIEEGIKELGSQILKEHPVENTQLQNEKLYLYYLQNGRDMYVDQELDINRLSDYDVDHIVPQSFLKDDSIDNKVLTRSDKNRGKSDNVPSEEVVKKMKNYWRQLLNAKLITQRKFDNLTKAERGGLSELDKAGFIKRQLVETRQITKHVAQILDSRMNTKYDENDKLIREVKVITLKSKLVSDFRKDFQFYKVREINNYHHAHDAYLNAVVGTALIKKYPKLEGSSGSETPGTSESATPESSGSEVEFSHEYWMRHALTLAKRARDEREVPVGAVLVLNNRVIGEGWNRAIGLHDPTAHAEIMALRQGGLVMQNYRLIDATLYVTFEPCVMCAGAMIHSRIGRVVFGVRNAKTGAAGSLMDVLHYPGMNHRVEITEGILADECAALLCYFFRMPRQSEFVYGDYKVYDVRKMIAKSEQEIGKATAKYFFYSNIMNFFKTEITLANGEIRKRPLIETNGETGEIVWDKGRDFATVRKVLSMPQVNIVKKTEVQTGGFSKESILPKRNSDKLIARKKDWDPKKYGGFDSPTVAYSVLVVAKVEKGKSKKLKSVKELLGITIMERSSFEKNPIDFLEAKGYKEVKKDLIIKLPKYSLFELENGRKRMLASAGELQKGNELALPSKYVNFLYLASHYEKLKGSPEDNEQKQLFVEQHKHYLDEIIEQISEFSKRVILADANLDKVLSAYNKHRDKPIREQAENIIHLFTLTNLGAPAAFKYFDTTIDRKRYTSTKEVLDATLIHQSITGLYETRIDLSQLGGD

SEQ ID NO: 289 - protein, 1541 aa, synthetic construct
  REGION 1..1541: note = 115.4 Cas9 TadAins 1007 polypeptide sequence
MDKKYSIGLAIGTNSVGWAVITDEYKVPSKKFKVLGNTDRHSIKKNLIGALLFDSGETAEATRLKRTARRRYTRRKNRICYLQEIFSNEMAKVDDSFFHRLEESFLVEEDKKHERHPIFGNIVDEVAYHEKYPTIYHLRKKLVDSTDKADLRLIYLALAHMIKFRGHFLIEGDLNPDNSDVDKLFIQLVQTYNQLFEENPINASGVDAKAILSARLSKSRRLENLIAQLPGEKKNGLFGNLIALSLGLTPNFKSNFDLAEDAKLQLSKDTYDDDLDNLLAQIGDQYADLFLAAKNLSDAILLSDILRVNTEITKAPLSASMIKRYDEHHQDLTLLKALVRQQLPEKYKEIFFDQSKNGYAGYIDGGASQEEFYKFIKPILEKMDGTEELLVKLNREDLLRKQRTFDNGSIPHQIHLGELHAILRRQEDFYPFLKDNREKIEKILTFRIPYYVGPLARGNSRFAWMTRKSEETITPWNFEEVVDKGASAQSFIERMTNFDKNLPNEKVLPKHSLLYEYFTVYNELTKVKYVTEGMRKPAFLSGEQKKAIVDLLFKTNRKVTVKQLKEDYFKKIECFDSVEISGVEDRFNASLGTYHDLLKIIKDKDFLDNEENEDILEDIVLTLTLFEDREMIEERLKTYAHLFDDKVMKQLKRRRYTGWGRLSRKLINGIRDKQSGKTILDFLKSDGFANRNFMQLIHDDSLTFKEDIQKAQVSGQGDSLHEHIANLAGSPAIKKGILQTVKVVDELVKVMGRHKPENIVIEMARENQTTQKGQKNSRERMKRIEEGIKELGSQILKEHPVENTQLQNEKLYLYYLQNGRDMYVDQELDINRLSDYDVDHIVPQSFLKDDSIDNKVLTRSDKNRGKSDNVPSEEVVKKMKNYWRQLLNAKLITQRKFDNLTKAERGGLSELDKAGFIKRQLVETRQITKHVAQILDSRMNTKYDENDKLIREVKVITLKSKLVSDFRKDFQFYKVREINNYHHAHDAYLNAVVGTALIKKYPKLESGSSGSETPGTSESATPESSGSEVEFSHEYWMRHALTLAKRARDEREVPVGAVLVLNNRVIGEGWNRAIGLHDPTAHAEIMALRQGGLVMQNYRLIDATLYVTFEPCVMCAGAMIHSRIGRVVFGVRNAKTGAAGSLMDVLHYPGMNHRVEITEGILADECAALLCYFFRMPRQEFVYGDYKVYDVRKMIAKSEQEIGKATAKYFFYSNIMNFFKTEITLANGEIRKRPLIETNGETGEIVWDKGRDFATVRKVLSMPQVNIVKKTEVQTGGFSKESILPKRNSDKLIARKKDWDPKKYGGFDSPTVAYSVLVVAKVEKGKSKKLKSVKELLGITIMERSSFEKNPIDFLEAKGYKEVKKDLIIKLPKYSLFELENGRKRMLASAGELQKGNELALPSKYVNFLYLASHYEKLKGSPEDNEQKQLFVEQHKHYLDEIIEQISEFSKRVILADANLDKVLSAYNKHRDKPIREQAENIIHLFTLTNLGAPAAFKYFDTTIDRKRYTSTKEVLDATLIHQSITGLYETRIDLSQLGGD

SEQ ID NO: 290 - protein, 1541 aa, synthetic construct
  REGION 1..1541: note = 116.1 Cas9 TadAins C-term truncate 792 polypeptide sequence
MDKKYSIGLAIGTNSVGWAVITDEYKVPSKKFKVLGNTDRHSIKKNLIGALLFDSGETAEATRLKRTARRRYTRRKNRICYLQEIFSNEMAKVDDSFFHRLEESFLVEEDKKHERHPIFGNIVDEVAYHEKYPTIYHLRKKLVDSTDKADLRLIYLALAHMIKFRGHFLIEGDLNPDNSDVDKLFIQLVQTYNQLFEENPINASGVDAKAILSARLSKSRRLENLIAQLPGEKKNGLFGNLIALSLGLTPNFKSNFDLAEDAKLQLSKDTYDDDLDNLLAQIGDQYADLFLAAKNLSDAILLSDILRVNTEITKAPLSASMIKRYDEHHQDLTLLKALVRQQLPEKYKEIFFDQSKNGYAGYIDGGASQEEFYKFIKPILEKMDGTEELLVKLNREDLLRKQRTFDNGSIPHQIHLGELHAILRRQEDFYPFLKDNREKIEKILTFRIPYYVGPLARGNSRFAWMTRKSEETITPWNFEEVVDKGASAQSFIERMTNFDKNLPNEKVLPKHSLLYEYFTVYNELTKVKYVTEGMRKPAFLSGEQKKAIVDLLFKTNRKVTVKQLKEDYFKKIECFDSVEISGVEDRFNASLGTYHDLLKIIKDKDFLDNEENEDILEDIVLTLTLFEDREMIEERLKTYAHLFDDKVMKQLKRRRYTGWGRLSRKLINGIRDKQSGKTILDFLKSDGFANRNFMQLIHDDSLTFKEDIQKAQVSGQGDSLHEHIANLAGSPAIKKGILQTVKVVDELVKVMGRHKPENIVIEMARENQTTQKGQKNSRERMKRIEEGIKELGGSSGSETPGTSESATPESSGSEVEFSHEYWMRHALTLAKRARDEREVPVGAVLVLNNRVIGEGWNRAIGLHDPTAHAEIMALRQGGLVMQNYRLIDATLYVTFEPCVMCAGAMIHSRIGRVVFGVRNAKTGAAGSLMDVLHYPGMNHRVEITEGILADECAALLCYFFRMPRQSQILKEHPVENTQLQNEKLYLYYLQNGRDMYVDQELDINRLSDYDVDHIVPQSFLKDDSIDNKVLTRSDKNRGKSDNVPSEEVVKKMKNYWRQLLNAKLITQRKFDNLTKAERGGLSELDKAGFIKRQLVETRQITKHVAQILDSRMNTKYDENDKLIREVKVITLKSKLVSDFRKDFQFYKVREINNYHHAHDAYLNAVVGTALIKKYPKLESEFVYGDYKVYDVRKMIAKSEQEIGKATAKYFFYSNIMNFFKTEITLANGEIRKRPLIETNGETGEIVWDKGRDFATVRKVLSMPQVNIVKKTEVQTGGFSKESILPKRNSDKLIARKKDWDPKKYGGFDSPTVAYSVLVVAKVEKGKSKKLKSVKELLGITIMERSSFEKNPIDFLEAKGYKEVKKDLIIKLPKYSLFELENGRKRMLASAGELQKGNELALPSKYVNFLYLASHYEKLKGSPEDNEQKQLFVEQHKHYLDEIIEQISEFSKRVILADANLDKVLSAYNKHRDKPIREQAENIIHLFTLTNLGAPAAFKYFDTTIDRKRYTSTKEVLDATLIHQSITGLYETRIDLSQLGGD

SEQ ID NO: 291 - protein, 1541 aa, synthetic construct
  REGION 1..1541: note = 116.2 Cas9 TadAins C-term truncate 791 polypeptide sequence
MDKKYSIGLAIGTNSVGWAVITDEYKVPSKKFKVLGNTDRHSIKKNLIGALLFDSGETAEATRLKRTARRRYTRRKNRICYLQEIFSNEMAKVDDSFFHRLEESFLVEEDKKHERHPIFGNIVDEVAYHEKYPTIYHLRKKLVDSTDKADLRLIYLALAHMIKFRGHFLIEGDLNPDNSDVDKLFIQLVQTYNQLFEENPINASGVDAKAILSARLSKSRRLENLIAQLPGEKKNGLFGNLIALSLGLTPNFKSNFDLAEDAKLQLSKDTYDDDLDNLLAQIGDQYADLFLAAKNLSDAILLSDILRVNTEITKAPLSASMIKRYDEHHQDLTLLKALVRQQLPEKYKEIFFDQSKNGYAGYIDGGASQEEFYKFIKPILEKMDGTEELLVKLNREDLLRKQRTFDNGSIPHQIHLGELHAILRRQEDFYPFLKDNREKIEKILTFRIPYYVGPLARGNSRFAWMTRKSEETITPWNFEEVVDKGASAQSFIERMTNFDKNLPNEKVLPKHSLLYEYFTVYNELTKVKYVTEGMRKPAFLSGEQKKAIVDLLFKTNRKVTVKQLKEDYFKKIECFDSVEISGVEDRFNASLGTYHDLLKIIKDKDFLDNEENEDILEDIVLTLTLFEDREMIEERLKTYAHLFDDKVMKQLKRRRYTGWGRLSRKLINGIRDKQSGKTILDFLKSDGFANRNFMQLIHDDSLTFKEDIQKAQVSGQGDSLHEHIANLAGSPAIKKGILQTVKVVDELVKVMGRHKPENIVIEMARENQTTQKGQKNSRERMKRIEEGIKELGSSGSETPGTSESATPESSGSEVEFSHEYWMRHALTLAKRARDEREVPVGAVLVLNNRVIGEGWNRAIGLHDPTAHAEIMALRQGGLVMQNYRLIDATLYVTFEPCVMCAGAMIHSRIGRVVFGVRNAKTGAAGSLMDVLHYPGMNHRVEITEGILADECAALLCYFFRMPRQGSQILKEHPVENTQLQNEKLYLYYLQNGRDMYVDQELDINRLSDYDVDHIVPQSFLKDDSIDNKVLTRSDKNRGKSDNVPSEEVVKKMKNYWRQLLNAKLITQRKFDNLTKAERGGLSELDKAGFIKRQLVETRQITKHVAQILDSRMNTKYDENDKLIREVKVITLKSKLVSDFRKDFQFYKVREINNYHHAHDAYLNAVVGTALIKKYPKLESEFVYGDYKVYDVRKMIAKSEQEIGKATAKYFFYSNIMNFFKTEITLANGEIRKRPLIETNGETGEIVWDKGRDFATVRKVLSMPQVNIVKKTEVQTGGFSKESILPKRNSDKLIARKKDWDPKKYGGFDSPTVAYSVLVVAKVEKGKSKKLKSVKELLGITIMERSSFEKNPIDFLEAKGYKEVKKDLIIKLPKYSLFELENGRKRMLASAGELQKGNELALPSKYVNFLYLASHYEKLKGSPEDNEQKQLFVEQHKHYLDEIIEQISEFSKRVILADANLDKVLSAYNKHRDKPIREQAENIIHLFTLTNLGAPAAFKYFDTTIDRKRYTSTKEVLDATLIHQSITGLYETRIDLSQLGGD

SEQ ID NO: 292 - protein, 1541 aa, synthetic construct
  REGION 1..1541: note = 116.3 Cas9 TadAins C-term truncate 790 polypeptide sequence
MDKKYSIGLAIGTNSVGWAVITDEYKVPSKKFKVLGNTDRHSIKKNLIGALLFDSGETAEATRLKRTARRRYTRRKNRICYLQEIFSNEMAKVDDSFFHRLEESFLVEEDKKHERHPIFGNIVDEVAYHEKYPTIYHLRKKLVDSTDKADLRLIYLALAHMIKFRGHFLIEGDLNPDNSDVDKLFIQLVQTYNQLFEENPINASGVDAKAILSARLSKSRRLENLIAQLPGEKKNGLFGNLIALSLGLTPNFKSNFDLAEDAKLQLSKDTYDDDLDNLLAQIGDQYADLFLAAKNLSDAILLSDILRVNTEITKAPLSASMIKRYDEHHQDLTLLKALVRQQLPEKYKEIFFDQSKNGYAGYIDGGASQEEFYKFIKPILEKMDGTEELLVKLNREDLLRKQRTFDNGSIPHQIHLGELHAILRRQEDFYPFLKDNREKIEKILTFRIPYYVGPLARGNSRFAWMTRKSEETITPWNFEEVVDKGASAQSFIERMTNFDKNLPNEKVLPKHSLLYEYFTVYNELTKVKYVTEGMRKPAFLSGEQKKAIVDLLFKTNRKVTVKQLKEDYFKKIECFDSVEISGVEDRFNASLGTYHDLLKIIKDKDFLDNEENEDILEDIVLTLTLFEDREMIEERLKTYAHLFDDKVMKQLKRRRYTGWGRLSRKLINGIRDKQSGKTILDFLKSDGFANRNFMQLIHDDSLTFKEDIQKAQVSGQGDSLHEHIANLAGSPAIKKGILQTVKVVDELVKVMGRHKPENIVIEMARENQTTQKGQKNSRERMKRIEEGIKEGSSGSETPGTSESATPESSGSEVEFSHEYWMRHALTLAKRARDEREVPVGAVLVLNNRVIGEGWNRAIGLHDPTAHAEIMALRQGGLVMQNYRLIDATLYVTFEPCVMCAGAMIHSRIGRVVFGVRNAKTGAAGSLMDVLHYPGMNHRVEITEGILADECAALLCYFFRMPRQLGSQILKEHPVENTQLQNEKLYLYYLQNGRDMYVDQELDINRLSDYDVDHIVPQSFLKDDSIDNKVLTRSDKNRGKSDNVPSEEVVKKMKNYWRQLLNAKLITQRKFDNLTKAERGGLSELDKAGFIKRQLVETRQITKHVAQILDSRMNTKYDENDKLIREVKVITLKSKLVSDFRKDFQFYKVREINNYHHAHDAYLNAVVGTALIKKYPKLESEFVYGDYKVYDVRKMIAKSEQEIGKATAKYFFYSNIMNFFKTEITLANGEIRKRPLIETNGETGEIVWDKGRDFATVRKVLSMPQVNIVKKTEVQTGGFSKESILPKRNSDKLIARKKDWDPKKYGGFDSPTVAYSVLVVAKVEKGKSKKLKSVKELLGITIMERSSFEKNPIDFLEAKGYKEVKKDLIIKLPKYSLFELENGRKRMLASAGELQKGNELALPSKYVNFLYLASHYEKLKGSPEDNEQKQLFVEQHKHYLDEIIEQISEFSKRVILADANLDKVLSAYNKHRDKPIREQAENIIHLFTLTNLGAPAAFKYFDTTIDRKRYTSTKEVLDATLIHQSITGLYETRIDLSQLGGD

SEQ ID NO: 293 - protein, 1484 aa, synthetic construct
  REGION 1..1484: note = 117 Cas9 delta 1017-1069 polypeptide sequence
MDKKYSIGLAIGTNSVGWAVITDEYKVPSKKFKVLGNTDRHSIKKNLIGALLFDSGETAEATRLKRTARRRYTRRKNRICYLQEIFSNEMAKVDDSFFHRLEESFLVEEDKKHERHPIFGNIVDEVAYHEKYPTIYHLRKKLVDSTDKADLRLIYLALAHMIKFRGHFLIEGDLNPDNSDVDKLFIQLVQTYNQLFEENPINASGVDAKAILSARLSKSRRLENLIAQLPGEKKNGLFGNLIALSLGLTPNFKSNFDLAEDAKLQLSKDTYDDDLDNLLAQIGDQYADLFLAAKNLSDAILLSDILRVNTEITKAPLSASMIKRYDEHHQDLTLLKALVRQQLPEKYKEIFFDQSKNGYAGYIDGGASQEEFYKFIKPILEKMDGTEELLVKLNREDLLRKQRTFDNGSIPHQIHLGELHAILRRQEDFYPFLKDNREKIEKILTFRIPYYVGPLARGNSRFAWMTRKSEETITPWNFEEVVDKGASAQSFIERMTNFDKNLPNEKVLPKHSLLYEYFTVYNELTKVKYVTEGMRKPAFLSGEQKKAIVDLLFKTNRKVTVKQLKEDYFKKIECFDSVEISGVEDRFNASLGTYHDLLKIIKDKDFLDNEENEDILEDIVLTLTLFEDREMIEERLKTYAHLFDDKVMKQLKRRRYTGWGRLSRKLINGIRDKQSGKTILDFLKSDGFANRNFMQLIHDDSLTFKEDIQKAQVSGQGDSLHEHIANLAGSPAIKKGILQTVKVVDELVKVMGRHKPENIVIEMARENQTTQKGQKNSRERMKRIEEGIKELGSQILKEHPVENTQLQNEKLYLYYLQNGRDMYVDQELDINRLSDYDVDHIVPQSFLKDDSIDNKVLTRSDKNRGKSDNVPSEEVVKKMKNYWRQLLNAKLITQRKFDNLTKAERGGLSELDKAGFIKRQLVETRQITKHVAQILDSRMNTKYDENDKLIREVKVITLKSKLVSDFRKDFQFYKVREINNYHHAHDAYLNAVVGTALIKKYPKLESEFVYGDYKVYSSGSEVEFSHEYWMRHALTLAKRARDEREVPVGAVLVLNNRVIGEGWNRAIGLHDPTAHAEIMALRQGGLVMQNYRLIDATLYVTFEPCVMCAGAMIHSRIGRVVFGVRNAKTGAAGSLMDVLHYPGMNHRVEITEGILADECAALLCYFFRMPRQVFNAQKKAQSSTDGEIVWDKGRDFATVRKVLSMPQVNIVKKTEVQTGGFSKESILPKRNSDKLIARKKDWDPKKYGGFDSPTVAYSVLVVAKVEKGKSKKLKSVKELLGITIMERSSFEKNPIDFLEAKGYKEVKKDLIIKLPKYSLFELENGRKRMLASAGELQKGNELALPSKYVNFLYLASHYEKLKGSPEDNEQKQLFVEQHKHYLDEIIEQISEFSKRVILADANLDKVLSAYNKHRDKPIREQAENIIHLFTLTNLGAPAAFKYFDTTIDRKRYTSTKEVLDATLIHQSITGLYETRIDLSQLGGD

SEQ ID NO: 294 - protein, 1554 aa, synthetic construct
  REGION 1..1554: note = 118 Cas9 TadA-CP116ins 1067 polypeptide sequence
MDKKYSIGLAIGTNSVGWAVITDEYKVPSKKFKVLGNTDRHSIKKNLIGALLFDSGETAEATRLKRTARRRYTRRKNRICYLQEIFSNEMAKVDDSFFHRLEESFLVEEDKKHERHPIFGNIVDEVAYHEKYPTIYHLRKKLVDSTDKADLRLIYLALAHMIKFRGHFLIEGDLNPDNSDVDKLFIQLVQTYNQLFEENPINASGVDAKAILSARLSKSRRLENLIAQLPGEKKNGLFGNLIALSLGLTPNFKSNFDLAEDAKLQLSKDTYDDDLDNLLAQIGDQYADLFLAAKNLSDAILLSDILRVNTEITKAPLSASMIKRYDEHHQDLTLLKALVRQQLPEKYKEIFFDQSKNGYAGYIDGGASQEEFYKFIKPILEKMDGTEELLVKLNREDLLRKQRTFDNGSIPHQIHLGELHAILRRQEDFYPFLKDNREKIEKILTFRIPYYVGPLARGNSRFAWMTRKSEETITPWNFEEVVDKGASAQSFIERMTNFDKNLPNEKVLPKHSLLYEYFTVYNELTKVKYVTEGMRKPAFLSGEQKKAIVDLLFKTNRKVTVKQLKEDYFKKIECFDSVEISGVEDRFNASLGTYHDLLKIIKDKDFLDNEENEDILEDIVLTLTLFEDREMIEERLKTYAHLFDDKVMKQLKRRRYTGWGRLSRKLINGIRDKQSGKTILDFLKSDGFANRNFMQLIHDDSLTFKEDIQKAQVSGQGDSLHEHIANLAGSPAIKKGILQTVKVVDELVKVMGRHKPENIVIEMARENQTTQKGQKNSRERMKRIEEGIKELGSQILKEHPVENTQLQNEKLYLYYLQNGRDMYVDQELDINRLSDYDVDHIVPQSFLKDDSIDNKVLTRSDKNRGKSDNVPSEEVVKKMKNYWRQLLNAKLITQRKFDNLTKAERGGLSELDKAGFIKRQLVETRQITKHVAQILDSRMNTKYDENDKLIREVKVITLKSKLVSDFRKDFQFYKVREINNYHHAHDAYLNAVVGTALIKKYPKLESEFVYGDYKVYDVRKMIAKSEQEIGKATAKYFFYSNIMNFFKTEITLANGEIRKRPLIETNMNHRVEITEGILADECAALLCYFFRMPRQVFNAQKKAQSSTDGSSGSETPGTSESATPESSGSEVEFSHEYWMRHALTLAKRARDEREVPVGAVLVLNNRVIGEGWNRAIGLHDPTAHAEIMALRQGGLVMQNYRLIDATLYVTFEPCVMCAGAMIHSRIGRVVFGVRNAKTGAAGSLMDVLHYPGGETGEIVWDKGRDFATVRKVLSMPQVNIVKKTEVQTGGFSKESILPKRNSDKLIARKKDWDPKKYGGFDSPTVAYSVLVVAKVEKGKSKKLKSVKELLGITIMERSSFEKNPIDFLEAKGYKEVKKDLIIKLPKYSLFELENGRKRMLASAGELQKGNELALPSKYVNFLYLASHYEKLKGSPEDNEQKQLFVEQHKHYLDEIIEQISEFSKRVILADANLDKVLSAYNKHRDKPIREQAENIIHLFTLTNLGAPAAFKYFDTTIDRKRYTSTKEVLDATLIHQSITGLYETRIDLSQLGGD

SEQ ID NO: 295 - protein, 1554 aa, synthetic construct
  REGION 1..1554: note = 119 Cas9 TadAins 701 polypeptide sequence
MDKKYSIGLAIGTNSVGWAVITDEYKVPSKKFKVLGNTDRHSIKKNLIGALLFDSGETAEATRLKRTARRRYTRRKNRICYLQEIFSNEMAKVDDSFFHRLEESFLVEEDKKHERHPIFGNIVDEVAYHEKYPTIYHLRKKLVDSTDKADLRLIYLALAHMIKFRGHFLIEGDLNPDNSDVDKLFIQLVQTYNQLFEENPINASGVDAKAILSARLSKSRRLENLIAQLPGEKKNGLFGNLIALSLGLTPNFKSNFDLAEDAKLQLSKDTYDDDLDNLLAQIGDQYADLFLAAKNLSDAILLSDILRVNTEITKAPLSASMIKRYDEHHQDLTLLKALVRQQLPEKYKEIFFDQSKNGYAGYIDGGASQEEFYKFIKPILEKMDGTEELLVKLNREDLLRKQRTFDNGSIPHQIHLGELHAILRRQEDFYPFLKDNREKIEKILTFRIPYYVGPLARGNSRFAWMTRKSEETITPWNFEEVVDKGASAQSFIERMTNFDKNLPNEKVLPKHSLLYEYFTVYNELTKVKYVTEGMRKPAFLSGEQKKAIVDLLFKTNRKVTVKQLKEDYFKKIECFDSVEISGVEDRFNASLGTYHDLLKIIKDKDFLDNEENEDILEDIVLTLTLFEDREMIEERLKTYAHLFDDKVMKQLKRRRYTGWGRLSRKLINGIRDKQSGKTILDFLKSDGFANRNFMQLIHDDSGSSGSETPGTSESATPESSGSEVEFSHEYWMRHALTLAKRARDEREVPVGAVLVLNNRVIGEGWNRAIGLHDPTAHAEIMALRQGGLVMQNYRLIDATLYVTFEPCVMCAGAMIHSRIGRVVFGVRNAKTGAAGSLMDVLHYPGMNHRVEITEGILADECAALLCYFFRMPRQVFNAQKKAQSSTDLTFKEDIQKAQVSGQGDSLHEHIANLAGSPAIKKGILQTVKVVDELVKVMGRHKPENIVIEMARENQTTQKGQKNSRERMKRIEEGIKELGSQILKEHPVENTQLQNEKLYLYYLQNGRDMYVDQELDINRLSDYDVDHIVPQSFLKDDSIDNKVLTRSDKNRGKSDNVPSEEVVKKMKNYWRQLLNAKLITQRKFDNLTKAERGGLSELDKAGFIKRQLVETRQITKHVAQILDSRMNTKYDENDKLIREVKVITLKSKLVSDFRKDFQFYKVREINNYHHAHDAYLNAVVGTALIKKYPKLESEFVYGDYKVYDVRKMIAKSEQEIGKATAKYFFYSNIMNFFKTEITLANGEIRKRPLIETNGETGEIVWDKGRDFATVRKVLSMPQVNIVKKTEVQTGGFSKESILPKRNSDKLIARKKDWDPKKYGGFDSPTVAYSVLVVAKVEKGKSKKLKSVKELLGITIMERSSFEKNPIDFLEAKGYKEVKKDLIIKLPKYSLFELENGRKRMLASAGELQKGNELALPSKYVNFLYLASHYEKLKGSPEDNEQKQLFVEQHKHYLDEIIEQISEFSKRVILADANLDKVLSAYNKHRDKPIREQAENIIHLFTLTNLGAPAAFKYFDTTIDRKRYTSTKEVLDATLIHQSITGLYETRIDLSQLGGD

SEQ ID NO: 296 - protein, 1554 aa, synthetic construct
  REGION 1..1554: note = 120 Cas9 TadACP136ins 1248 polypeptide sequence
MDKKYSIGLAIGTNSVGWAVITDEYKVPSKKFKVLGNTDRHSIKKNLIGALLFDSGETAEATRLKRTARRRYTRRKNRICYLQEIFSNEMAKVDDSFFHRLEESFLVEEDKKHERHPIFGNIVDEVAYHEKYPTIYHLRKKLVDSTDKADLRLIYLALAHMIKFRGHFLIEGDLNPDNSDVDKLFIQLVQTYNQLFEENPINASGVDAKAILSARLSKSRRLENLIAQLPGEKKNGLFGNLIALSLGLTPNFKSNFDLAEDAKLQLSKDTYDDDLDNLLAQIGDQYADLFLAAKNLSDAILLSDILRVNTEITKAPLSASMIKRYDEHHQDLTLLKALVRQQLPEKYKEIFFDQSKNGYAGYIDGGASQEEFYKFIKPILEKMDGTEELLVKLNREDLLRKQRTFDNGSIPHQIHLGELHAILRRQEDFYPFLKDNREKIEKILTFRIPYYVGPLARGNSRFAWMTRKSEETITPWNFEEVVDKGASAQSFIERMTNFDKNLPNEKVLPKHSLLYEYFTVYNELTKVKYVTEGMRKPAFLSGEQKKAIVDLLFKTNRKVTVKQLKEDYFKKIECFDSVEISGVEDRFNASLGTYHDLLKIIKDKDFLDNEENEDILEDIVLTLTLFEDREMIEERLKTYAHLFDDKVMKQLKRRRYTGWGRLSRKLINGIRDKQSGKTILDFLKSDGFANRNFMQLIHDDSLTFKEDIQKAQVSGQGDSLHEHIANLAGSPAIKKGILQTVKVVDELVKVMGRHKPENIVIEMARENQTTQKGQKNSRERMKRIEEGIKELGSQILKEHPVENTQLQNEKLYLYYLQNGRDMYVDQELDINRLSDYDVDHIVPQSFLKDDSIDNKVLTRSDKNRGKSDNVPSEEVVKKMKNYWRQLLNAKLITQRKFDNLTKAERGGLSELDKAGFIKRQLVETRQITKHVAQILDSRMNTKYDENDKLIREVKVITLKSKLVSDFRKDFQFYKVREINNYHHAHDAYLNAVVGTALIKKYPKLESEFVYGDYKVYDVRKMIAKSEQEIGKATAKYFFYSNIMNFFKTEITLANGEIRKRPLIETNGETGEIVWDKGRDFATVRKVLSMPQVNIVKKTEVQTGGFSKESILPKRNSDKLIARKKDWDPKKYGGFDSPTVAYSVLVVAKVEKGKSKKLKSVKELLGITIMERSSFEKNPIDFLEAKGYKEVKKDLIIKLPKYSLFELENGRKRMLASAGELQKGNELALPSKYVNFLYLASHYEKLKGSMNHRVEITEGILADECAALLCYFFRMPRQVFNAQKKAQSSTDGSSGSETPGTSESATPESSGSEVEFSHEYWMRHALTLAKRARDEREVPVGAVLVLNNRVIGEGWNRAIGLHDPTAHAEIMALRQGGLVMQNYRLIDATLYVTFEPCVMCAGAMIHSRIGRVVFGVRNAKTGAAGSLMDVLHYPGPEDNEQKQLFVEQHKHYLDEIIEQISEFSKRVILADANLDKVLSAYNKHRDKPIREQAENIIHLFTLTNLGAPAAFKYFDTTIDRKRYTSTKEVLDATLIHQSITGLYETRIDLSQLGGD

SEQ ID NO: 297 - protein, 1554 aa, synthetic construct
  REGION 1..1554: note = 121 Cas9 TadACP136ins 1052 polypeptide sequence
MDKKYSIGLAIGTNSVGWAVITDEYKVPSKKFKVLGNTDRHSIKKNLIGALLFDSGETAEATRLKRTARRRYTRRKNRICYLQEIFSNEMAKVDDSFFHRLEESFLVEEDKKHERHPIFGNIVDEVAYHEKYPTIYHLRKKLVDSTDKADLRLIYLALAHMIKFRGHFLIEGDLNPDNSDVDKLFIQLVQTYNQLFEENPINASGVDAKAILSARLSKSRRLENLIAQLPGEKKNGLFGNLIALSLGLTPNFKSNFDLAEDAKLQLSKDTYDDDLDNLLAQIGDQYADLFLAAKNLSDAILLSDILRVNTEITKAPLSASMIKRYDEHHQDLTLLKALVRQQLPEKYKEIFFDQSKNGYAGYIDGGASQEEFYKFIKPILEKMDGTEELLVKLNREDLLRKQRTFDNGSIPHQIHLGELHAILRRQEDFYPFLKDNREKIEKILTFRIPYYVGPLARGNSRFAWMTRKSEETITPWNFEEVVDKGASAQSFIERMTNFDKNLPNEKVLPKHSLLYEYFTVYNELTKVKYVTEGMRKPAFLSGEQKKAIVDLLFKTNRKVTVKQLKEDYFKKIECFDSVEISGVEDRFNASLGTYHDLLKIIKDKDFLDNEENEDILEDIVLTLTLFEDREMIEERLKTYAHLFDDKVMKQLKRRRYTGWGRLSRKLINGIRDKQSGKTILDFLKSDGFANRNFMQLIHDDSLTFKEDIQKAQVSGQGDSLHEHIANLAGSPAIKKGILQTVKVVDELVKVMGRHKPENIVIEMARENQTTQKGQKNSRERMKRIEEGIKELGSQILKEHPVENTQLQNEKLYLYYLQNGRDMYVDQELDINRLSDYDVDHIVPQSFLKDDSIDNKVLTRSDKNRGKSDNVPSEEVVKKMKNYWRQLLNAKLITQRKFDNLTKAERGGLSELDKAGFIKRQLVETRQITKHVAQILDSRMNTKYDENDKLIREVKVITLKSKLVSDFRKDFQFYKVREINNYHHAHDAYLNAVVGTALIKKYPKLESEFVYGDYKVYDVRKMIAKSEQEIGKATAKYFFYSNIMNFFKTEITLAMNHRVEITEGILADECAALLCYFFRMPRQVFNAQKKAQSSTDGSSGSETPGTSESATPESSGSEVEFSHEYWMRHALTLAKRARDEREVPVGAVLVLNNRVIGEGWNRAIGLHDPTAHAEIMALRQGGLVMQNYRLIDATLYVTFEPCVMCAGAMIHSRIGRVVFGVRNAKTGAAGSLMDVLHYPGNGEIRKRPLIETNGETGEIVWDKGRDFATVRKVLSMPQVNIVKKTEVQTGGFSKESILPKRNSDKLIARKKDWDPKKYGGFDSPTVAYSVLVVAKVEKGKSKKLKSVKELLGITIMERSSFEKNPIDFLEAKGYKEVKKDLIIKLPKYSLFELENGRKRMLASAGELQKGNELALPSKYVNFLYLASHYEKLKGSPEDNEQKQLFVEQHKHYLDEIIEQISEFSKRVILADANLDKVLSAYNKHRDKPIREQAENIIHLFTLTNLGAPAAFKYFDTTIDRKRYTSTKEVLDATLIHQSITGLYETRIDLSQLGGD

SEQ ID NO: 298 - protein, 1554 aa, synthetic construct
  REGION 1..1554: note = 122 Cas9 TadACP136ins 1041 polypeptide sequence
MDKKYSIGLAIGTNSVGWAVITDEYKVPSKKFKVLGNTDRHSIKKNLIGALLFDSGETAEATRLKRTARRRYTRRKNRICYLQEIFSNEMAKVDDSFFHRLEESFLVEEDKKHERHPIFGNIVDEVAYHEKYPTIYHLRKKLVDSTDKADLRLIYLALAHMIKFRGHFLIEGDLNPDNSDVDKLFIQLVQTYNQLFEENPINASGVDAKAILSARLSKSRRLENLIAQLPGEKKNGLFGNLIALSLGLTPNFKSNFDLAEDAKLQLSKDTYDDDLDNLLAQIGDQYADLFLAAKNLSDAILLSDILRVNTEITKAPLSASMIKRYDEHHQDLTLLKALVRQQLPEKYKEIFFDQSKNGYAGYIDGGASQEEFYKFIKPILEKMDGTEELLVKLNREDLLRKQRTFDNGSIPHQIHLGELHAILRRQEDFYPFLKDNREKIEKILTFRIPYYVGPLARGNSRFAWMTRKSEETITPWNFEEVVDKGASAQSFIERMTNFDKNLPNEKVLPKHSLLYEYFTVYNELTKVKYVTEGMRKPAFLSGEQKKAIVDLLFKTNRKVTVKQLKEDYFKKIECFDSVEISGVEDRFNASLGTYHDLLKIIKDKDFLDNEENEDILEDIVLTLTLFEDREMIEERLKTYAHLFDDKVMKQLKRRRYTGWGRLSRKLINGIRDKQSGKTILDFLKSDGFANRNFMQLIHDDSLTFKEDIQKAQVSGQGDSLHEHIANLAGSPAIKKGILQTVKVVDELVKVMGRHKPENIVIEMARENQTTQKGQKNSRERMKRIEEGIKELGSQILKEHPVENTQLQNEKLYLYYLQNGRDMYVDQELDINRLSDYDVDHIVPQSFLKDDSIDNKVLTRSDKNRGKSDNVPSEEVVKKMKNYWRQLLNAKLITQRKFDNLTKAERGGLSELDKAGFIKRQLVETRQITKHVAQILDSRMNTKYDENDKLIREVKVITLKSKLVSDFRKDFQFYKVREINNYHHAHDAYLNAVVGTALIKKYPKLESEFVYGDYKVYDVRKMIAKSEQEIGKATAKYFFYSMNHRVEITEGILADECAALLCYFFRMPRQVFNAQKKAQSSTDGSSGSETPGTSESATPESSGSEVEFSHEYWMRHALTLAKRARDEREVPVGAVLVLNNRVIGEGWNRAIGLHDPTAHAEIMALRQGGLVMQNYRLIDATLYVTFEPCVMCAGAMIHSRIGRVVFGVRNAKTGAAGSLMDVLHYPGNIMNFFKTEITLANGEIRKRPLIETNGETGEIVWDKGRDFATVRKVLSMPQVNIVKKTEVQTGGFSKESILPKRNSDKLIARKKDWDPKKYGGFDSPTVAYSVLVVAKVEKGKSKKLKSVKELLGITIMERSSFEKNPIDFLEAKGYKEVKKDLIIKLPKYSLFELENGRKRMLASAGELQKGNELALPSKYVNFLYLASHYEKLKGSPEDNEQKQLFVEQHKHYLDEIIEQISEFSKRVILADANLDKVLSAYNKHRDKPIREQAENIIHLFTLTNLGAPAAFKYFDTTIDRKRYTSTKEVLDATLIHQSITGLYETRIDLSQLGGD

SEQ ID NO: 299 - protein, 1554 aa, synthetic construct
  REGION 1..1554: note = 123 Cas9 TadACP139ins 1299 polypeptide sequence
MDKKYSIGLAIGTNSVGWAVITDEYKVPSKKFKVLGNTDRHSIKKNLIGALLFDSGETAEATRLKRTARRRYTRRKNRICYLQEIFSNEMAKVDDSFFHRLEESFLVEEDKKHERHPIFGNIVDEVAYHEKYPTIYHLRKKLVDSTDKADLRLIYLALAHMIKFRGHFLIEGDLNPDNSDVDKLFIQLVQTYNQLFEENPINASGVDAKAILSARLSKSRRLENLIAQLPGEKKNGLFGNLIALSLGLTPNFKSNFDLAEDAKLQLSKDTYDDDLDNLLAQIGDQYADLFLAAKNLSDAILLSDILRVNTEITKAPLSASMIKRYDEHHQDLTLLKALVRQQLPEKYKEIFFDQSKNGYAGYIDGGASQEEFYKFIKPILEKMDGTEELLVKLNREDLLRKQRTFDNGSIPHQIHLGELHAILRRQEDFYPFLKDNREKIEKILTFRIPYYVGPLARGNSRFAWMTRKSEETITPWNFEEVVDKGASAQSFIERMTNFDKNLPNEKVLPKHSLLYEYFTVYNELTKVKYVTEGMRKPAFLSGEQKKAIVDLLFKTNRKVTVKQLKEDYFKKIECFDSVEISGVEDRFNASLGTYHDLLKIIKDKDFLDNEENEDILEDIVLTLTLFEDREMIEERLKTYAHLFDDKVMKQLKRRRYTGWGRLSRKLINGIRDKQSGKTILDFLKSDGFANRNFMQLIHDDSLTFKEDIQKAQVSGQGDSLHEHIANLAGSPAIKKGILQTVKVVDELVKVMGRHKPENIVIEMARENQTTQKGQKNSRERMKRIEEGIKELGSQILKEHPVENTQLQNEKLYLYYLQNGRDMYVDQELDINRLSDYDVDHIVPQSFLKDDSIDNKVLTRSDKNRGKSDNVPSEEVVKKMKNYWRQLLNAKLITQRKFDNLTKAERGGLSELDKAGFIKRQLVETRQITKHVAQILDSRMNTKYDENDKLIREVKVITLKSKLVSDFRKDFQFYKVREINNYHHAHDAYLNAVVGTALIKKYPKLESEFVYGDYKVYDVRKMIAKSEQEIGKATAKYFFYSNIMNFFKTEITLANGEIRKRPLIETNGETGEIVWDKGRDFATVRKVLSMPQVNIVKKTEVQTGGFSKESILPKRNSDKLIARKKDWDPKKYGGFDSPTVAYSVLVVAKVEKGKSKKLKSVKELLGITIMERSSFEKNPIDFLEAKGYKEVKKDLIIKLPKYSLFELENGRKRMLASAGELQKGNELALPSKYVNFLYLASHYEKLKGSPEDNEQKQLFVEQHKHYLDEIIEQISEFSKRVILADANLDKVLSAYNKHRMNHRVEITEGILADECAALLCYFFRMPRQVFNAQKKAQSSTDGSSGSETPGTSESATPESSGSEVEFSHEYWMRHALTLAKRARDEREVPVGAVLVLNNRVIGEGWNRAIGLHDPTAHAEIMALRQGGLVMQNYRLIDATLYVTFEPCVMCAGAMIHSRIGRVVFGVRNAKTGAAGSLMDVLHYPGDKPIREQAENIIHLFTLTNLGAPAAFKYFDTTIDRKRYTSTKEVLDATLIHQSITGLYETRIDLSQLGGD

SEQ ID NO: 300 - protein, 1454 aa, synthetic construct
  REGION 1..1454: note = 124 Cas9 delta 792-872TadAins polypeptide sequence
MDKKYSIGLAIGTNSVGWAVITDEYKVPSKKFKVLGNTDRHSIKKNLIGALLFDSGETAEATRLKRTARRRYTRRKNRICYLQEIFSNEMAKVDDSFFHRLEESFLVEEDKKHERHPIFGNIVDEVAYHEKYPTIYHLRKKLVDSTDKADLRLIYLALAHMIKFRGHFLIEGDLNPDNSDVDKLFIQLVQTYNQLFEENPINASGVDAKAILSARLSKSRRLENLIAQLPGEKKNGLFGNLIALSLGLTPNFKSNFDLAEDAKLQLSKDTYDDDLDNLLAQIGDQYADLFLAAKNLSDAILLSDILRVNTEITKAPLSASMIKRYDEHHQDLTLLKALVRQQLPEKYKEIFFDQSKNGYAGYIDGGASQEEFYKFIKPILEKMDGTEELLVKLNREDLLRKQRTFDNGSIPHQIHLGELHAILRRQEDFYPFLKDNREKIEKILTFRIPYYVGPLARGNSRFAWMTRKSEETITPWNFEEVVDKGASAQSFIERMTNFDKNLPNEKVLPKHSLLYEYFTVYNELTKVKYVTEGMRKPAFLSGEQKKAIVDLLFKTNRKVTVKQLKEDYFKKIECFDSVEISGVEDRFNASLGTYHDLLKIIKDKDFLDNEENEDILEDIVLTLTLFEDREMIEERLKTYAHLFDDKVMKQLKRRRYTGWGRLSRKLINGIRDKQSGKTILDFLKSDGFANRNFMQLIHDDSLTFKEDIQKAQVSGQGDSLHEHIANLAGSPAIKKGILQTVKVVDELVKVMGRHKPENIVIEMARENQTTQKGQKNSRERMKRIEEGIKELGSEVEFSHEYWMRHALTLAKRARDEREVPVGAVLVLNNRVIGEGWNRAIGLHDPTAHAEIMALRQGGLVMQNYRLIDATLYVTFEPCVMCAGAMIHSRIGRVVFGVRNAKTGAAGSLMDVLHYPGMNHRVEITEGILADECAALLCYFFRMPRQVFNAQKKAQSSTDEEVVKKMKNYWRQLLNAKLITQRKFDNLTKAERGGLSELDKAGFIKRQLVETRQITKHVAQILDSRMNTKYDENDKLIREVKVITLKSKLVSDFRKDFQFYKVREINNYHHAHDAYLNAVVGTALIKKYPKLESEFVYGDYKVYDVRKMIAKSEQEIGKATAKYFFYSNIMNFFKTEITLANGEIRKRPLIETNGETGEIVWDKGRDFATVRKVLSMPQVNIVKKTEVQTGGFSKESILPKRNSDKLIARKKDWDPKKYGGFDSPTVAYSVLVVAKVEKGKSKKLKSVKELLGITIMERSSFEKNPIDFLEAKGYKEVKKDLIIKLPKYSLFELENGRKRMLASAGELQKGNELALPSKYVNFLYLASHYEKLKGSPEDNEQKQLFVEQHKHYLDEIIEQISEFSKRVILADANLDKVLSAYNKHRDKPIREQAENIIHLFTLTNLGAPAAFKYFDTTIDRKRYTSTKEVLDATLIHQSITGLYETRIDLSQLGGD

SEQ ID NO: 301 - protein, 1420 aa, synthetic construct
  REGION 1..1420: note = 125 Cas9 delta 792-906TadAins polypeptide sequence
MDKKYSIGLAIGTNSVGWAVITDEYKVPSKKFKVLGNTDRHSIKKNLIGALLFDSGETAEATRLKRTARRRYTRRKNRICYLQEIFSNEMAKVDDSFFHRLEESFLVEEDKKHERHPIFGNIVDEVAYHEKYPTIYHLRKKLVDSTDKADLRLIYLALAHMIKFRGHFLIEGDLNPDNSDVDKLFIQLVQTYNQLFEENPINASGVDAKAILSARLSKSRRLENLIAQLPGEKKNGLFGNLIALSLGLTPNFKSNFDLAEDAKLQLSKDTYDDDLDNLLAQIGDQYADLFLAAKNLSDAILLSDILRVNTEITKAPLSASMIKRYDEHHQDLTLLKALVRQQLPEKYKEIFFDQSKNGYAGYIDGGASQEEFYKFIKPILEKMDGTEELLVKLNREDLLRKQRTFDNGSIPHQIHLGELHAILRRQEDFYPFLKDNREKIEKILTFRIPYYVGPLARGNSRFAWMTRKSEETITPWNFEEVVDKGASAQSFIERMTNFDKNLPNEKVLPKHSLLYEYFTVYNELTKVKYVTEGMRKPAFLSGEQKKAIVDLLFKTNRKVTVKQLKEDYFKKIECFDSVEISGVEDRFNASLGTYHDLLKIIKDKDFLDNEENEDILEDIVLTLTLFEDREMIEERLKTYAHLFDDKVMKQLKRRRYTGWGRLSRKLINGIRDKQSGKTILDFLKSDGFANRNFMQLIHDDSLTFKEDIQKAQVSGQGDSLHEHIANLAGSPAIKKGILQTVKVVDELVKVMGRHKPENIVIEMARENQTTQKGQKNSRERMKRIEEGIKELGSEVEFSHEYWMRHALTLAKRARDEREVPVGAVLVLNNRVIGEGWNRAIGLHDPTAHAEIMALRQGGLVMQNYRLIDATLYVTFEPCVMCAGAMIHSRIGRVVFGVRNAKTGAAGSLMDVLHYPGMNHRVEITEGILADECAALLCYFFRMPRQVFNAQKKAQSSTDGLSELDKAGFIKRQLVETRQITKHVAQILDSRMNTKYDENDKLIREVKVITLKSKLVSDFRKDFQFYKVREINNYHHAHDAYLNAVVGTALIKKYPKLESEFVYGDYKVYDVRKMIAKSEQEIGKATAKYFFYSNIMNFFKTEITLANGEIRKRPLIETNGETGEIVWDKGRDFATVRKVLSMPQVNIVKKTEVQTGGFSKESILPKRNSDKLIARKKDWDPKKYGGFDSPTVAYSVLVVAKVEKGKSKKLKSVKELLGITIMERSSFEKNPIDFLEAKGYKEVKKDLIIKLPKYSLFELENGRKRMLASAGELQKGNELALPSKYVNFLYLASHYEKLKGSPEDNEQKQLFVEQHKHYLDEIIEQISEFSKRVILADANLDKVLSAYNKHRDKPIREQAENIIHLFTLTNLGAPAAFKYFDTTIDRKRYTSTKEVLDATLIHQSITGLYETRIDLSQLGGD

SEQ ID NO: 302 - protein, 1554 aa, synthetic construct
  REGION 1..1554: note = 126 TadA CP65ins 1003 polypeptide sequence
MDKKYSIGLAIGTNSVGWAVITDEYKVPSKKFKVLGNTDRHSIKKNLIGALLFDSGETAEATRLKRTARRRYTRRKNRICYLQEIFSNEMAKVDDSFFHRLEESFLVEEDKKHERHPIFGNIVDEVAYHEKYPTIYHLRKKLVDSTDKADLRLIYLALAHMIKFRGHFLIEGDLNPDNSDVDKLFIQLVQTYNQLFEENPINASGVDAKAILSARLSKSRRLENLIAQLPGEKKNGLFGNLIALSLGLTPNFKSNFDLAEDAKLQLSKDTYDDDLDNLLAQIGDQYADLFLAAKNLSDAILLSDILRVNTEITKAPLSASMIKRYDEHHQDLTLLKALVRQQLPEKYKEIFFDQSKNGYAGYIDGGASQEEFYKFIKPILEKMDGTEELLVKLNREDLLRKQRTFDNGSIPHQIHLGELHAILRRQEDFYPFLKDNREKIEKILTFRIPYYVGPLARGNSRFAWMTRKSEETITPWNFEEVVDKGASAQSFIERMTNFDKNLPNEKVLPKHSLLYEYFTVYNELTKVKYVTEGMRKPAFLSGEQKKAIVDLLFKTNRKVTVKQLKEDYFKKIECFDSVEISGVEDRFNASLGTYHDLLKIIKDKDFLDNEENEDILEDIVLTLTLFEDREMIEERLKTYAHLFDDKVMKQLKRRRYTGWGRLSRKLINGIRDKQSGKTILDFLKSDGFANRNFMQLIHDDSLTFKEDIQKAQVSGQGDSLHEHIANLAGSPAIKKGILQTVKVVDELVKVMGRHKPENIVIEMARENQTTQKGQKNSRERMKRIEEGIKELGSQILKEHPVENTQLQNEKLYLYYLQNGRDMYVDQELDINRLSDYDVDHIVPQSFLKDDSIDNKVLTRSDKNRGKSDNVPSEEVVKKMKNYWRQLLNAKLITQRKFDNLTKAERGGLSELDKAGFIKRQLVETRQITKHVAQILDSRMNTKYDENDKLIREVKVITLKSKLVSDFRKDFQFYKVREINNYHHAHDAYLNAVVGTALIKKYPKTAHAEIMALRQGGLVMQNYRLIDATLYVTFEPCVMCAGAMIHSRIGRVVFGVRNAKTGAAGSLMDVLHYPGMNHRVEITEGILADECAALLCYFFRMPRQVFNAQKKAQSSTDGSSGSETPGTSESATPESSGSEVEFSHEYWMRHALTLAKRARDEREVPVGAVLVLNNRVIGEGWNRAIGLHDPLESEFVYGDYKVYDVRKMIAKSEQEIGKATAKYFFYSNIMNFFKTEITLANGEIRKRPLIETNGETGEIVWDKGRDFATVRKVLSMPQVNIVKKTEVQTGGFSKESILPKRNSDKLIARKKDWDPKKYGGFDSPTVAYSVLVVAKVEKGKSKKLKSVKELLGITIMERSSFEKNPIDFLEAKGYKEVKKDLIIKLPKYSLFELENGRKRMLASAGELQKGNELALPSKYVNFLYLASHYEKLKGSPEDNEQKQLFVEQHKHYLDEIIEQISEFSKRVILADANLDKVLSAYNKHRDKPIREQAENIIHLFTLTNLGAPAAFKYFDTTIDRKRYTSTKEVLDATLIHQSITGLYETRIDLSQLGGD

SEQ ID NO: 303 - protein, 1554 aa, synthetic construct
  REGION 1..1554: note = 127 TadA CP65ins 1016 polypeptide sequence
MDKKYSIGLAIGTNSVGWAVITDEYKVPSKKFKVLGNTDRHSIKKNLIGALLFDSGETAEATRLKRTARRRYTRRKNRICYLQEIFSNEMAKVDDSFFHRLEESFLVEEDKKHERHPIFGNIVDEVAYHEKYPTIYHLRKKLVDSTDKADLRLIYLALAHMIKFRGHFLIEGDLNPDNSDVDKLFIQLVQTYNQLFEENPINASGVDAKAILSARLSKSRRLENLIAQLPGEKKNGLFGNLIALSLGLTPNFKSNFDLAEDAKLQLSKDTYDDDLDNLLAQIGDQYADLFLAAKNLSDAILLSDILRVNTEITKAPLSASMIKRYDEHHQDLTLLKALVRQQLPEKYKEIFFDQSKNGYAGYIDGGASQEEFYKFIKPILEKMDGTEELLVKLNREDLLRKQRTFDNGSIPHQIHLGELHAILRRQEDFYPFLKDNREKIEKILTFRIPYYVGPLARGNSRFAWMTRKSEETITPWNFEEVVDKGASAQSFIERMTNFDKNLPNEKVLPKHSLLYEYFTVYNELTKVKYVTEGMRKPAFLSGEQKKAIVDLLFKTNRKVTVKQLKEDYFKKIECFDSVEISGVEDRFNASLGTYHDLLKIIKDKDFLDNEENEDILEDIVLTLTLFEDREMIEERLKTYAHLFDDKVMKQLKRRRYTGWGRLSRKLINGIRDKQSGKTILDFLKSDGFANRNFMQLIHDDSLTFKEDIQKAQVSGQGDSLHEHIANLAGSPAIKKGILQTVKVVDELVKVMGRHKPENIVIEMARENQTTQKGQKNSRERMKRIEEGIKELGSQILKEHPVENTQLQNEKLYLYYLQNGRDMYVDQELDINRLSDYDVDHIVPQSFLKDDSIDNKVLTRSDKNRGKSDNVPSEEVVKKMKNYWRQLLNAKLITQRKFDNLTKAERGGLSELDKAGFIKRQLVETRQITKHVAQILDSRMNTKYDENDKLIREVKVITLKSKLVSDFRKDFQFYKVREINNYHHAHDAYLNAVVGTALIKKYPKLESEFVYGDYKVTAHAEIMALRQGGLVMQNYRLIDATLYVTFEPCVMCAGAMIHSRIGRVVFGVRNAKTGAAGSLMDVLHYPGMNHRVEITEGILADECAALLCYFFRMPRQVFNAQKKAQSSTDGSSGSETPGTSESATPESSGSEVEFSHEYWMRHALTLAKRARDEREVPVGAVLVLNNRVIGEGWNRAIGLHDPYDVRKMIAKSEQEIGKATAKYFFYSNIMNFFKTEITLANGEIRKRPLIETNGETGEIVWDKGRDFATVRKVLSMPQVNIVKKTEVQTGGFSKESILPKRNSDKLIARKKDWDPKKYGGFDSPTVAYSVLVVAKVEKGKSKKLKSVKELLGITIMERSSFEKNPIDFLEAKGYKEVKKDLIIKLPKYSLFELENGRKRMLASAGELQKGNELALPSKYVNFLYLASHYEKLKGSPEDNEQKQLFVEQHKHYLDEIIEQISEFSKRVILADANLDKVLSAYNKHRDKPIREQAENIIHLFTLTNLGAPAAFKYFDTTIDRKRYTSTKEVLDATLIHQSITGLYETRIDLSQLGGD

SEQ ID NO: 304 - protein, 1554 aa, synthetic construct
  REGION 1..1554: note = 128 TadA CP65ins 1022 polypeptide sequence
MDKKYSIGLAIGTNSVGWAVITDEYKVPSKKFKVLGNTDRHSIKKNLIGALLFDSGETAEATRLKRTARRRYTRRKNRICYLQEIFSNEMAKVDDSFFHRLEESFLVEEDKKHERHPIFGNIVDEVAYHEKYPTIYHLRKKLVDSTDKADLRLIYLALAHMIKFRGHFLIEGDLNPDNSDVDKLFIQLVQTYNQLFEENPINASGVDAKAILSARLSKSRRLENLIAQLPGEKKNGLFGNLIALSLGLTPNFKSNFDLAEDAKLQLSKDTYDDDLDNLLAQIGDQYADLFLAAKNLSDAILLSDILRVNTEITKAPLSASMIKRYDEHHQDLTLLKALVRQQLPEKYKEIFFDQSKNGYAGYIDGGASQEEFYKFIKPILEKMDGTEELLVKLNREDLLRKQRTFDNGSIPHQIHLGELHAILRRQEDFYPFLKDNREKIEKILTFRIPYYVGPLARGNSRFAWMTRKSEETITPWNFEEVVDKGASAQSFIERMTNFDKNLPNEKVLPKHSLLYEYFTVYNELTKVKYVTEGMRKPAFLSGEQKKAIVDLLFKTNRKVTVKQLKEDYFKKIECFDSVEISGVEDRFNASLGTYHDLLKIIKDKDFLDNEENEDILEDIVLTLTLFEDREMIEERLKTYAHLFDDKVMKQLKRRRYTGWGRLSRKLINGIRDKQSGKTILDFLKSDGFANRNFMQLIHDDSLTFKEDIQKAQVSGQGDSLHEHIANLAGSPAIKKGILQTVKVVDELVKVMGRHKPENIVIEMARENQTTQKGQKNSRERMKRIEEGIKELGSQILKEHPVENTQLQNEKLYLYYLQNGRDMYVDQELDINRLSDYDVDHIVPQSFLKDDSIDNKVLTRSDKNRGKSDNVPSEEVVKKMKNYWRQLLNAKLITQRKFDNLTKAERGGLSELDKAGFIKRQLVETRQITKHVAQILDSRMNTKYDENDKLIREVKVITLKSKLVSDFRKDFQFYKVREINNYHHAHDAYLNAVVGTALIKKYPKLESEFVYGDYKVYDVRKMITAHAEIMALRQGGLVMQNYRLIDATLYVTFEPCVMCAGAMIHSRIGRVVFGVRNAKTGAAGSLMDVLHYPGMNHRVEITEGILADECAALLCYFFRMPRQVFNAQKKAQSSTDGSSGSETPGTSESATPESSGSEVEFSHEYWMRHALTLAKRARDEREVPVGAVLVLNNRVIGEGWNRAIGLHDPAKSEQEIGKATAKYFFYSNIMNFFKTEITLANGEIRKRPLIETNGETGEIVWDKGRDFATVRKVLSMPQVNIVKKTEVQTGGFSKESILPKRNSDKLIARKKDWDPKKYGGFDSPTVAYSVLVVAKVEKGKSKKLKSVKELLGITIMERSSFEKNPIDFLEAKGYKEVKKDLIIKLPKYSLFELENGRKRMLASAGELQKGNELALPSKYVNFLYLASHYEKLKGSPEDNEQKQLFVEQHKHYLDEIIEQISEFSKRVILADANLDKVLSAYNKHRDKPIREQAENIIHLFTLTNLGAPAAFKYFDTTIDRKRYTSTKEVLDATLIHQSITGLYETRIDLSQLGGD

SEQ ID NO: 305 - protein, 1554 aa, synthetic construct
  REGION 1..1554: note = 129 TadA CP65ins 1029 polypeptide sequence
MDKKYSIGLAIGTNSVGWAVITDEYKVPSKKFKVLGNTDRHSIKKNLIGALLFDSGETAEATRLKRTARRRYTRRKNRICYLQEIFSNEMAKVDDSFFHRLEESFLVEEDKKHERHPIFGNIVDEVAYHEKYPTIYHLRKKLVDSTDKADLRLIYLALAHMIKFRGHFLIEGDLNPDNSDVDKLFIQLVQTYNQLFEENPINASGVDAKAILSARLSKSRRLENLIAQLPGEKKNGLFGNLIALSLGLTPNFKSNFDLAEDAKLQLSKDTYDDDLDNLLAQIGDQYADLFLAAKNLSDAILLSDILRVNTEITKAPLSASMIKRYDEHHQDLTLLKALVRQQLPEKYKEIFFDQSKNGYAGYIDGGASQEEFYKFIKPILEKMDGTEELLVKLNREDLLRKQRTFDNGSIPHQIHLGELHAILRRQEDFYPFLKDNREKIEKILTFRIPYYVGPLARGNSRFAWMTRKSEETITPWNFEEVVDKGASAQSFIERMTNFDKNLPNEKVLPKHSLLYEYFTVYNELTKVKYVTEGMRKPAFLSGEQKKAIVDLLFKTNRKVTVKQLKEDYFKKIECFDSVEISGVEDRFNASLGTYHDLLKIIKDKDFLDNEENEDILEDIVLTLTLFEDREMIEERLKTYAHLFDDKVMKQLKRRRYTGWGRLSRKLINGIRDKQSGKTILDFLKSDGFANRNFMQLIHDDSLTFKEDIQKAQVSGQGDSLHEHIANLAGSPAIKKGILQTVKVVDELVKVMGRHKPENIVIEMARENQTTQKGQKNSRERMKRIEEGIKELGSQILKEHPVENTQLQNEKLYLYYLQNGRDMYVDQELDINRLSDYDVDHIVPQSFLKDDSIDNKVLTRSDKNRGKSDNVPSEEVVKKMKNYWRQLLNAKLITQRKFDNLTKAERGGLSELDKAGFIKRQLVETRQITKHVAQILDSRMNTKYDENDKLIREVKVITLKSKLVSDFRKDFQFYKVREINNYHHAHDAYLNAVVGTALIKKYPKLESEFVYGDYKVYDVRKMIAKSEQEITAHAEIMALRQGGLVMQNYRLIDATLYVTFEPCVMCAGAMIHSRIGRVVFGVRNAKTGAAGSLMDVLHYPGMNHRVEITEGILADECAALLCYFFRMPRQVFNAQKKAQSSTDGSSGSETPGTSESATPESSGSEVEFSHEYWMRHALTLAKRARDEREVPVGAVLVLNNRVIGEGWNRAIGLHDPGKATAKYFFYSNIMNFFKTEITLANGEIRKRPLIETNGETGEIVWDKGRDFATVRKVLSMPQVNIVKKTEVQTGGFSKESILPKRNSDKLIARKKDWDPKKYGGFDSPTVAYSVLVVAKVEKGKSKKLKSVKELLGITIMERSSFEKNPIDFLEAKGYKEVKKDLIIKLPKYSLFELENGRKRMLASAGELQKGNELALPSKYVNFLYLASHYEKLKGSPEDNEQKQLFVEQHKHYLDEIIEQISEFSKRVILADANLDKVLSAYNKHRDKPIREQAENIIHLFTLTNLGAPAAFKYFDTTIDRKRYTSTKEVLDATLIHQSITGLYETRIDLSQLGGD

SEQ ID NO: 306 - protein, 1554 aa, synthetic construct
  REGION 1..1554: note = 130 TadA CP65ins 1041 polypeptide sequence
MDKKYSIGLAIGTNSVGWAVITDEYKVPSKKFKVLGNTDRHSIKKNLIGALLFDSGETAEATRLKRTARRRYTRRKNRICYLQEIFSNEMAKVDDSFFHRLEESFLVEEDKKHERHPIFGNIVDEVAYHEKYPTIYHLRKKLVDSTDKADLRLIYLALAHMIKFRGHFLIEGDLNPDNSDVDKLFIQLVQTYNQLFEENPINASGVDAKAILSARLSKSRRLENLIAQLPGEKKNGLFGNLIALSLGLTPNFKSNFDLAEDAKLQLSKDTYDDDLDNLLAQIGDQYADLFLAAKNLSDAILLSDILRVNTEITKAPLSASMIKRYDEHHQDLTLLKALVRQQLPEKYKEIFFDQSKNGYAGYIDGGASQEEFYKFIKPILEKMDGTEELLVKLNREDLLRKQRTFDNGSIPHQIHLGELHAILRRQEDFYPFLKDNREKIEKILTFRIPYYVGPLARGNSRFAWMTRKSEETITPWNFEEVVDKGASAQSFIERMTNFDKNLPNEKVLPKHSLLYEYFTVYNELTKVKYVTEGMRKPAFLSGEQKKAIVDLLFKTNRKVTVKQLKEDYFKKIECFDSVEISGVEDRFNASLGTYHDLLKIIKDKDFLDNEENEDILEDIVLTLTLFEDREMIEERLKTYAHLFDDKVMKQLKRRRYTGWGRLSRKLINGIRDKQSGKTILDFLKSDGFANRNFMQLIHDDSLTFKEDIQKAQVSGQGDSLHEHIANLAGSPAIKKGILQTVKVVDELVKVMGRHKPENIVIEMARENQTTQKGQKNSRERMKRIEEGIKELGSQILKEHPVENTQLQNEKLYLYYLQNGRDMYVDQELDINRLSDYDVDHIVPQSFLKDDSIDNKVLTRSDKNRGKSDNVPSEEVVKKMKNYWRQLLNAKLITQRKFDNLTKAERGGLSELDKAGFIKRQLVETRQITKHVAQILDSRMNTKYDENDKLIREVKVITLKSKLVSDFRKDFQFYKVREINNYHHAHDAYLNAVVGTALIKKYPKLESEFVYGDYKVYDVRKMIAKSEQEIGKATAKYFFYSTAHAEIMALRQGGLVMQNYRLIDATLYVTFEPCVMCAGAMIHSRIGRVVFGVRNAKTGAAGSLMDVLHYPGMNHRVEITEGILADECAALLCYFFRMPRQVFNAQKKAQSSTDGSSGSETPGTSESATPESSGSEVEFSHEYWMRHALTLAKRARDEREVPVGAVLVLNNRVIGEGWNRAIGLHDPNIMNFFKTEITLANGEIRKRPLIETNGETGEIVWDKGRDFATVRKVLSMPQVNIVKKTEVQTGGFSKESILPKRNSDKLIARKKDWDPKKYGGFDSPTVAYSVLVVAKVEKGKSKKLKSVKELLGITIMERSSFEKNPIDFLEAKGYKEVKKDLIIKLPKYSLFELENGRKRMLASAGELQKGNELALPSKYVNFLYLASHYEKLKGSPEDNEQKQLFVEQHKHYLDEIIEQISEFSKRVILADANLDKVLSAYNKHRDKPIREQAENIIHLFTLTNLGAPAAFKYFDTTIDRKRYTSTKEVLDATLIHQSITGLYETRIDLSQLGGD

SEQ ID NO: 307 - protein, 1554 aa, synthetic construct
  REGION 1..1554: note = 131 TadA CP65ins 1054 polypeptide sequence
MDKKYSIGLAIGTNSVGWAVITDEYKVPSKKFKVLGNTDRHSIKKNLIGALLFDSGETAEATRLKRTARRRYTRRKNRICYLQEIFSNEMAKVDDSFFHRLEESFLVEEDKKHERHPIFGNIVDEVAYHEKYPTIYHLRKKLVDSTDKADLRLIYLALAHMIKFRGHFLIEGDLNPDNSDVDKLFIQLVQTYNQLFEENPINASGVDAKAILSARLSKSRRLENLIAQLPGEKKNGLFGNLIALSLGLTPNFKSNFDLAEDAKLQLSKDTYDDDLDNLLAQIGDQYADLFLAAKNLSDAILLSDILRVNTEITKAPLSASMIKRYDEHHQDLTLLKALVRQQLPEKYKEIFFDQSKNGYAGYIDGGASQEEFYKFIKPILEKMDGTEELLVKLNREDLLRKQRTFDNGSIPHQIHLGELHAILRRQEDFYPFLKDNREKIEKILTFRIPYYVGPLARGNSRFAWMTRKSEETITPWNFEEVVDKGASAQSFIERMTNFDKNLPNEKVLPKHSLLYEYFTVYNELTKVKYVTEGMRKPAFLSGEQKKAIVDLLFKTNRKVTVKQLKEDYFKKIECFDSVEISGVEDRFNASLGTYHDLLKIIKDKDFLDNEENEDILEDIVLTLTLFEDREMIEERLKTYAHLFDDKVMKQLKRRRYTGWGRLSRKLINGIRDKQSGKTILDFLKSDGFANRNFMQLIHDDSLTFKEDIQKAQVSGQGDSLHEHIANLAGSPAIKKGILQTVKVVDELVKVMGRHKPENIVIEMARENQTTQKGQKNSRERMKRIEEGIKELGSQILKEHPVENTQLQNEKLYLYYLQNGRDMYVDQELDINRLSDYDVDHIVPQSFLKDDSIDNKVLTRSDKNRGKSDNVPSEEVVKKMKNYWRQLLNAKLITQRKFDNLTKAERGGLSELDKAGFIKRQLVETRQITKHVAQILDSRMNTKYDENDKLIREVKVITLKSKLVSDFRKDFQFYKVREINNYHHAHDAYLNAVVGTALIKKYPKLESEFVYGDYKVYDVRKMIAKSEQEIGKATAKYFFYSNIMNFFKTEITLANTAHAEIMALRQGGLVMQNYRLIDATLYVTFEPCVMCAGAMIHSRIGRVVFGVRNAKTGAAGSLMDVLHYPGMNHRVEITEGILADECAALLCYFFRMPRQVFNAQKKAQSSTDGSSGSETPGTSESATPESSGSEVEFSHEYWMRHALTLAKRARDEREVPVGAVLVLNNRVIGEGWNRAIGLHDPGEIRKRPLIETNGETGEIVWDKGRDFATVRKVLSMPQVNIVKKTEVQTGGFSKESILPKRNSDKLIARKKDWDPKKYGGFDSPTVAYSVLVVAKVEKGKSKKLKSVKELLGITIMERSSFEKNPIDFLEAKGYKEVKKDLIIKLPKYSLFELENGRKRMLASAGELQKGNELALPSKYVNFLYLASHYEKLKGSPEDNEQKQLFVEQHKHYLDEIIEQISEFSKRVILADANLDKVLSAYNKHRDKPIREQAENIIHLFTLTNLGAPAAFKYFDTTIDRKRYTSTKEVLDATLIHQSITGLYETRIDLSQLGGD

SEQ ID NO: 308 - protein, 1554 aa, synthetic construct
  REGION 1..1554: note = 132 TadA CP65ins 1246 polypeptide sequence
MDKKYSIGLAIGTNSVGWAVITDEYKVPSKKFKVLGNTDRHSIKKNLIGALLFDSGETAEATRLKRTARRRYTRRKNRICYLQEIFSNEMAKVDDSFFHRLEESFLVEEDKKHERHPIFGNIVDEVAYHEKYPTIYHLRKKLVDSTDKADLRLIYLALAHMIKFRGHFLIEGDLNPDNSDVDKLFIQLVQTYNQLFEENPINASGVDAKAILSARLSKSRRLENLIAQLPGEKKNGLFGNLIALSLGLTPNFKSNFDLAEDAKLQLSKDTYDDDLDNLLAQIGDQYADLFLAAKNLSDAILLSDILRVNTEITKAPLSASMIKRYDEHHQDLTLLKALVRQQLPEKYKEIFFDQSKNGYAGYIDGGASQEEFYKFIKPILEKMDGTEELLVKLNREDLLRKQRTFDNGSIPHQIHLGELHAILRRQEDFYPFLKDNREKIEKILTFRIPYYVGPLARGNSRFAWMTRKSEETITPWNFEEVVDKGASAQSFIERMTNFDKNLPNEKVLPKHSLLYEYFTVYNELTKVKYVTEGMRKPAFLSGEQKKAIVDLLFKTNRKVTVKQLKEDYFKKIECFDSVEISGVEDRFNASLGTYHDLLKIIKDKDFLDNEENEDILEDIVLTLTLFEDREMIEERLKTYAHLFDDKVMKQLKRRRYTGWGRLSRKLINGIRDKQSGKTILDFLKSDGFANRNFMQLIHDDSLTFKEDIQKAQVSGQGDSLHEHIANLAGSPAIKKGILQTVKVVDELVKVMGRHKPENIVIEMARENQTTQKGQKNSRERMKRIEEGIKELGSQILKEHPVENTQLQNEKLYLYYLQNGRDMYVDQELDINRLSDYDVDHIVPQSFLKDDSIDNKVLTRSDKNRGKSDNVPSEEVVKKMKNYWRQLLNAKLITQRKFDNLTKAERGGLSELDKAGFIKRQLVETRQITKHVAQILDSRMNTKYDENDKLIREVKVITLKSKLVSDFRKDFQFYKVREINNYHHAHDAYLNAVVGTALIKKYPKLESEFVYGDYKVYDVRKMIAKSEQEIGKATAKYFFYSNIMNFFKTEITLANGEIRKRPLIETNGETGEIVWDKGRDFATVRKVLSMPQVNIVKKTEVQTGGFSKESILPKRNSDKLIARKKDWDPKKYGGFDSPTVAYSVLVVAKVEKGKSKKLKSVKELLGITIMERSSFEKNPIDFLEAKGYKEVKKDLIIKLPKYSLFELENGRKRMLASAGELQKGNELALPSKYVNFLYLASHYEKLKGTAHAEIMALRQGGLVMQNYRLIDATLYVTFEPCVMCAGAMIHSRIGRVVFGVRNAKTGAAGSLMDVLHYPGMNHRVEITEGILADECAALLCYFFRMPRQVFNAQKKAQSSTDGSSGSETPGTSESATPESSGSEVEFSHEYWMRHALTLAKRARDEREVPVGAVLVLNNRVIGEGWNRAIGLHDPSPEDNEQKQLFVEQHKHYLDEIIEQISEFSKRVILADANLDKVLSAYNKHRDKPIREQAENIIHLFTLTNLGAPAAFKYFDTTIDRKRYTSTKEVLDATLIHQSITGLYETRIDLSQLGGD

SEQ ID NO: 309 - protein, 160 aa, Staphylococcus aureus
  REGION 1..160: note = MISC_FEATURE - TadA polypeptide sequence
MGSHMTNDIYFMTLAIEEAKKAAQLGEVPIGAIITKDDEVIARAHNLRETLQQPTAHAEHIAIERAAKVLGSWRLEGCTLYVTLEPCVMCAGTIVMSRIPRVVYGADDPKGGCSGSLMNLLQQSNFNHRAIVDKGVLKEACSTLLTTFFKNLRANKKSTN

SEQ ID NO: 310 - protein, 161 aa, Bacillus subtilis
  REGION 1..161: note = MISC_FEATURE - TadA polypeptide sequence
MTQDELYMKEAIKEAKKAEEKGEVPIGAVLVINGEIIARAHNLRETEQRSIAHAEMLVIDEACKALGTWRLEGATLYVTLEPCPMCAGAVVLSRVEKVVFGAFDPKGGCSGTLMNLLQEERFNHQAEVVSGVLEEECGGMLSAFFRELRKKKKAARKNLSE

SEQ ID NO: 311 - protein, 183 aa, Salmonella enterica
  REGION 1..183: note = MISC_FEATURE - TadA polypeptide sequence
  source 1..183: note = serovar Typhimurium
MPPAFITGVTSLSDVELDHEYWMRHALTLAKRAWDEREVPVGAVLVHNHRVIGEGWNRPIGRHDPTAHAEIMALRQGGLVLQNYRLLDTTLYVTLEPCVMCAGAMVHSRIGRVVFGARDAKTGAAGSLIDVLHHPGMNHRVEIIEGVLRDECATLLSDFFRMRRQEIKALKKADRAEGAGPAV

SEQ ID NO: 312 - protein, 164 aa, Shewanella putrefaciens
  REGION 1..164: note = MISC_FEATURE - TadA polypeptide sequence
MDEYWMQVAMQMAEKAEAAGEVPVGAVLVKDGQQIATGYNLSISQHDPTAHAEILCLRSAGKKLENYRLLDATLYITLEPCAMCAGAMVHSRIARVVYGARDEKTGAAGTVVNLLQHPAFNHQVEVTSGVLAEACSAQLSRFFKRRRDEKKALKLAQRAQQGIE

SEQ ID NO: 313 - protein, 173 aa, Haemophilus influenzae
  REGION 1..173: note = MISC_FEATURE - TadA polypeptide sequence
MDAAKVRSEFDEKMMRYALELADKAEALGEIPVGAVLVDDARNIIGEGWNLSIVQSDPTAHAEIIALRNGAKNIQNYRLLNSTLYVTLEPCTMCAGAILHSRIKRLVFGASDYKTGAIGSRFHFFDDYKMNHTLEITSGVLAEECSQKLSTFFQKRREEKKIEKALLKSLSDK

SEQ ID NO: 314 - protein, 161 aa, Caulobacter vibrioides
  REGION 1..161: note = MISC_FEATURE - TadA polypeptide sequence
MRTDESEDQDHRMMRLALDAARAAAEAGETPVGAVILDPSTGEVIATAGNGPIAAHDPTAHAEIAAMRAAAAKLGNYRLTDLTLVVTLEPCAMCAGAISHARIGRVVFGADDPKGGAVVHGPKFFAQPTCHWRPEVTGGVLADESADLLRGFFRARRKAKI

SEQ ID NO: 315 - protein, 179 aa, Geobacter sulfurreducens
  REGION 1..179: note = MISC_FEATURE - TadA polypeptide sequence
MSSLKKTPIRDDAYWMGKAIREAAKAAARDEVPIGAVIVRDGAVIGRGHNLREGSNDPSAHAEMIAIRQAARRSANWRLTGATLYVTLEPCLMCMGAIILARLERVVFGCYDPKGGAAGSLYDLSADPRLNHQVRLSPGVCQEECGTMLSDFFRDLRRRKKAKATPALFIDERKVPPEP

SEQ ID NO: 316 - protein, 167 aa, synthetic construct
  REGION 1..167: note = TadA*8 polypeptide sequence
MSEVEFSHEYWMRHALTLAKRARDEREVPVGAVLVLNNRVIGEGWNRAIGLHDPTAHAEIMALRQGGLVMQNYRLIDATLYVTFEPCVMCAGAMIHSRIGRVVFGVRNAKTGAAGSLMDVLHYPGMNHRVEITEGILADECAALLCTFFRMPRQVFNAQKKAQSSTD

SEQ ID NO: 317 - RNA, 80 nt, synthetic construct
  misc_feature 1..80: note = gRNA scaffold polynucleotide sequence
  source 1..80: mol_type = other RNA
gttttagagctagaaatagcaagttaaaataaggctagtccgttatcaacttgaaaaagtggcaccgagtcggtgctttt

SEQ ID NO: 318 - RNA, 125 nt, synthetic construct
  misc_feature 1..125: note = gRNA scaffold polynucleotide sequence
  source 1..125: mol_type = other RNA
gtttttgtactctcaagatttaagtaactgtacaacgaaacttacacagttacttaaatcttgcagaagctacaaagataaggcttcatgccgaaatcaacaccctgtcattttatggcagggtg

SEQ ID NO: 319 - RNA, 76 nt, Streptococcus pyogenes
  misc_feature 1..76: note = S. pyogenes gRNA scaffold oligonucleotide sequence
  source 1..76: mol_type = other RNA
gttttagagctagaaatagcaagttaaaataaggctagtccgttatcaacttgaaaaagtggcaccgagtcggtgc

SEQ ID NO: 320 - RNA, 84 nt, Staphylococcus aureus
  misc_feature 1..84: note = S. aureus gRNA scaffold oligonucleotide sequence
  source 1..84: mol_type = other RNA
gttttagtactctgtaatgaaaattacagaatctactaaaacaaggcaaaatgccgtgtttatctcgtcaacttgttggcgaga

SEQ ID NO: 321 - RNA, 97 nt, Bacillus hisashii
  misc_feature 1..97: note = BhCas12b gRNA scaffold oligonucleotide sequence
  source 1..97: mol_type = other RNA
gttctgtcttttggtcaggacaaccgtctagctataagtgctgcagggtgtgagaaactcctattgctggacgatgtctcttacgaggcattagcac

SEQ ID NO: 322 - RNA, 88 nt, Bacillus sp.
  misc_feature 1..88: note = BvCas12b gRNA scaffold oligonucleotide sequence
  source 1..88: mol_type = other RNA
gacctatagggtcaatgaatctgtgcgtgtgccataagtaattaaaaattacccaccacaggagcacctgaaaacaggtgcttggcac

SEQ ID NO: 323 - RNA, 80 nt, synthetic construct
  misc_feature 1..80: note = gRNA scaffold nucleotide sequence; oligonucleotide sequence
  modified_base 78..80: mod_base = um
  misc_feature 78..80: note = In embodiments, a nucleotide(s) is linked to the preceding 5' nucleotide by a 3' phosphorothioate internucleotide linkage
  source 1..80: mol_type = other RNA
gttttagagctagaaatagcaagttaaaataaggctagtccgttatcaacttgaaaaagtgggaccgagtcggtgctttt

SEQ ID NO: 324 - RNA, 80 nt, synthetic construct; identical to SEQ ID NO: 317
  misc_feature 1..80: note = gRNA scaffold nucleotide sequence
  misc_feature 78..80: note = In embodiments, a nucleotide(s) is linked to the preceding 5' nucleotide by a 3' phosphorothioate internucleotide linkage
  modified_base 78..80: mod_base = um
  source 1..80: mol_type = other RNA

SEQ ID NO: 325 - RNA, 117 nt, Bacillus hisashii
  misc_feature 1..117: note = BhCas12b gRNA scaffold + guide sequence; oligonucleotide sequence
  misc_feature 1..97: note = BhCas12b sgRNA scaffold
  source 1..117: mol_type = other RNA
gttctgtcttttggtcaggacaaccgtctagctataagtgctgcagggtgtgagaaactcctattgctggacgatgtctcttacgaggcattagcacnnnnnnnnnnnnnnnnnnnn

SEQ ID NO: 326 - RNA, 108 nt, Bacillus sp.
  misc_feature 1..108: note = BvCas12b gRNA scaffold + guide sequence; oligonucleotide sequence
  misc_feature 1..88: note = BvCas12b gRNA scaffold
  source 1..108: mol_type = other RNA
gacctatagggtcaatgaatctgtgcgtgtgccataagtaattaaaaattacccaccacaggagcacctgaaaacaggtgcttggcacnnnnnnnnnnnnnnnnnnnn

SEQ ID NO: 327 - RNA, 119 nt, Alicyclobacillus acidiphilus
  misc_feature 1..119: note = AaCas12b gRNA scaffold + guide sequence; oligonucleotide sequence
  misc_feature 1..99: note = AaCas12b gRNA scaffold
  source 1..119: mol_type = other RNA
gtctaaaggacagaatttttcaacgggtgtgccaatggccactttccaggtggcaaagcccgttgaacttctcaaaaagaacgatctgagaagtggcacnnnnnnnnnnnnnnnnnnnn

SEQ ID NO: 328 - protein, 29 aa, synthetic construct
  REGION 1..29: note = synthetic polypeptide sequence
PKKKRKVEGADKRTADGSEFESPKKKRKV

SEQ ID NO: 329 - protein, 23 aa, synthetic construct
  REGION 1..23: note = synthetic peptide sequence
RKSGKIAAIVVKRPRKPKKKRKV

SEQ ID NO: 330 - protein, 8 aa, synthetic construct
  REGION 1..8: note = synthetic peptide sequence
SGGSSGGS

SEQ ID NO: 331 - protein, 1609 aa, synthetic construct
  REGION 1..1609: note = pNMG-B335ABE8.1_Y147T_CP5_NGC PAM_monomer polypeptide sequence
MSEVEFSHEYWMRHALTLAKRARDEREVPVGAVLVLNNRVIGEGWNRAIGLHDPTAHAEIMALRQGGLVMQNYRLIDATLYVTFEPCVMCAGAMIHSRIGRVVFGVRNAKTGAAGSLMDVLHYPGMNHRVEITEGILADECAALLCTFFRMPRQVFNAQKKAQSSTDSGGSSGGSSGSETPGTSESATPESSGGSSGGSEIGKATAKYFFYSNIMNFFKTEITLANGEIRKRPLIETNGETGEIVWDKGRDFATVRKVLSMPQVNIVKKTEVQTGGFSKESILPKRNSDKLIARKKDWDPKKYGGFMQPTVAYSVLVVAKVEKGKSKKLKSVKELLGITIMERSSFEKNPIDFLEAKGYKEVKKDLIIKLPKYSLFELENGRKRMLASAKFLQKGNELALPSKYVNFLYLASHYEKLKGSPEDNEQKQLFVEQHKHYLDEIIEQISEFSKRVILADANLDKVLSAYNKHRDKPIREQAENIIHLFTLTNLGAPRAFKYFDTTIARKEYRSTKEVLDATLIHQSITGLYETRIDLSQLGGDGGSGGSGGSGGSGGSGGSGGMDKKYSIGLAIGTNSVGWAVITDEYKVPSKKFKVLGNTDRHSIKKNLIGALLFDSGETAEATRLKRTARRRYTRRKNRICYLQEIFSNEMAKVDDSFFHRLEESFLVEEDKKHERHPIFGNIVDEVAYHEKYPTIYHLRKKLVDSTDKADLRLIYLALAHMIKFRGHFLIEGDLNPDNSDVDKLFIQLVQTYNQLFEENPINASGVDAKAILSARLSKSRRLENLIAQLPGEKKNGLFGNLIALSLGLTPNFKSNFDLAEDAKLQLSKDTYDDDLDNLLAQIGDQYADLFLAAKNLSDAILLSDILRVNTEITKAPLSASMIKRYDEHHQDLTLLKALVRQQLPEKYKEIFFDQSKNGYAGYIDGGASQEEFYKFIKPILEKMDGTEELLVKLNREDLLRKQRTFDNGSIPHQIHLGELHAILRRQEDFYPFLKDNREKIEKILTFRIPYYVGPLARGNSRFAWMTRKSEETITPWNFEEVVDKGASAQSFIERMTNFDKNLPNEKVLPKHSLLYEYFTVYNELTKVKYVTEGMRKPAFLSGEQKKAIVDLLFKTNRKVTVKQLKEDYFKKIECFDSVEISGVEDRFNASLGTYHDLLKIIKDKDFLDNEENEDILEDIVLTLTLFEDREMIEERLKTYAHLFDDKVMKQLKRRRYTGWGRLSRKLINGIRDKQSGKTILDFLKSDGFANRNFMQLIHDDSLTFKEDIQKAQVSGQGDSLHEHIANLAGSPAIKKGILQTVKVVDELVKVMGRHKPENIVIEMARENQTTQKGQKNSRERMKRIEEGIKELGSQILKEHPVENTQLQNEKLYLYYLQNGRDMYVDQELDINRLSDYDVDHIVPQSFLKDDSIDNKVLTRSDKNRGKSDNVPSEEVVKKMKNYWRQLLNAKLITQRKFDNLTKAERGGLSELDKAGFIKRQLVETRQITKHVAQILDSRMNTKYDENDKLIREVKVITLKSKLVSDFRKDFQFYKVREINNYHHAHDAYLNAVVGTALIKKYPKLESEFVYGDYKVYDVRKMIAKSEQEGADKRTADGSEFESPKKKRKV

SEQ ID NO: 332 - protein, 1807 aa, synthetic construct
  REGION 1..1807: note = pNMG-357_ABE8.14 with NGC PAMCP5 polypeptide sequence
  REGION 1..174: note = MISC_FEATURE - Adenosine deaminase sequence
  REGION 175..198: note = MISC_FEATURE - Linker sequence
  REGION 199..365: note = MISC_FEATURE - Adenosine deaminase sequence
  REGION 366..397: note = MISC_FEATURE - Linker sequence
  REGION 398..738: note = MISC_FEATURE - Sequence derived from Cas9
  REGION 739..759: note = MISC_FEATURE - Linker sequence
  REGION 760..1785: note = MISC_FEATURE - Sequence derived from Cas9
  REGION 1786..1807: note = MISC_FEATURE - Bipartite nuclear localization sequence
MSEVEFSHEYWMRHALTLAKRAWDEREVPVGAVLVHNNRVIGEGWNRPIGRHDPTAHAEIMALRQGGLVMQNYRLIDATLYVTLEPCVMCAGAMIHSRIGRVVFGARDAKTGAAGSLMDVLHHPGMNHRVEITEGILADECAALLSDFFRMRRQEIKAQKKAQSSTDGGSSGGSSGSETPGTSESATPESSGGSSGGSMSEVEFSHEYWMRHALTLAKRARDEREVPVGAVLVLNNRVIGEGWNRAIGLHDPTAHAEIMALRQGGLVMQNYRLIDATLYVTFEPCVMCAGAMIHSRIGRVVFGVRNAKTGAAGSLMDVLHYPGMNHRVEITEGILADECAALLCTFFRMPRQVFNAQKKAQSSTDSGGSSGGSSGSETPGTSESATPESSGGSSGGSEIGKATAKYFFYSNIMNFFKTEITLANGEIRKRPLIETNGETGEIVWDKGRDFATVRKVLSMPQVNIVKKTEVQTGGFSKESILPKRNSDKLIARKKDWDPKKYGGFMQPTVAYSVLVVAKVEKGKSKKLKSVKELLGITIMERSSFEKNPIDFLEAKGYKEVKKDLIIKLPKYSLFELENGRKRMLASAKFLQKGNELALPSKYVNFLYLASHYEKLKGSPEDNEQKQLFVEQHKHYLDEIIEQISEFSKRVILADANLDKVLSAYNKHRDKPIREQAENIIHLFTLTNLGAPRAFKYFDTTIARKEYRSTKEVLDATLIHQSITGLYETRIDLSQLGGDGGSGGSGGSGGSGGSGGSGGMDKKYSIGLAIGTNSVGWAVITDEYKVPSKKFKVLGNTDRHSIKKNLIGALLFDSGETAEATRLKRTARRRYTRRKNRICYLQEIFSNEMAKVDDSFFHRLEESFLVEEDKKHERHPIFGNIVDEVAYHEKYPTIYHLRKKLVDSTDKADLRLIYLALAHMIKFRGHFLIEGDLNPDNSDVDKLFIQLVQTYNQLFEENPINASGVDAKAILSARLSKSRRLENLIAQLPGEKKNGLFGNLIALSLGLTPNFKSNFDLAEDAKLQLSKDTYDDDLDNLLAQIGDQYADLFLAAKNLSDAILLSDILRVNTEITKAPLSASMIKRYDEHHQDLTLLKALVRQQLPEKYKEIFFDQSKNGYAGYIDGGASQEEFYKFIKPILEKMDGTEELLVKLNREDLLRKQRTFDNGSIPHQIHLGELHAILRRQEDFYPFLKDNREKIEKILTFRIPYYVGPLARGNSRFAWMTRKSEETITPWNFEEVVDKGASAQSFIERMTNFDKNLPNEKVLPKHSLLYEYFTVYNELTKVKYVTEGMRKPAFLSGEQKKAIVDLLFKTNRKVTVKQLKEDYFKKIECFDSVEISGVEDRFNASLGTYHDLLKIIKDKDFLDNEENEDILEDIVLTLTLFEDREMIEERLKTYAHLFDDKVMKQLKRRRYTGWGRLSRKLINGIRDKQSGKTILDFLKSDGFANRNFMQLIHDDSLTFKEDIQKAQVSGQGDSLHEHIANLAGSPAIKKGILQTVKVVDELVKVMGRHKPENIVIEMARENQTTQKGQKNSRERMKRIEEGIKELGSQILKEHPVENTQLQNEKLYLYYLQNGRDMYVDQELDINRLSDYDVDHIVPQSFLKDDSIDNKVLTRSDKNRGKSDNVPSEEVVKKMKNYWRQLLNAKLITQRKFDNLTKAERGGLSELDKAGFIKRQLVETRQITKHVAQILDSRMNTKYDENDKLIREVKVITLKSKLVSDFRKDFQFYKVREINNYHHAHDAYLNAVVGTALIKKYPKLESEFVYGDYKVYDVRKMIAKSEQEGADKRTADGSEFESPKKKRKV

SEQ ID NO: 333 - protein, 1588 aa, synthetic construct
  REGION 1..1588: note = ABE8.8-m polypeptide sequence
  REGION 1..167: note = MISC_FEATURE - Adenosine deaminase sequence
  REGION 168..199: note = MISC_FEATURE - Linker sequence
  REGION 200..1566: note = MISC_FEATURE - Sequence derived from Cas9
  REGION 1567..1588: note = MISC_FEATURE - Bipartite nuclear localization sequence
MSEVEFSHEYWMRHALTLAKRARDEREVPVGAVLVLNNRVIGEGWNRAIGLHDPTAHAEIMALRQGGLVMQNYRLIDATLYVTFEPCVMCAGAMIHSRIGRVVFGVRNAKTGAAGSLMDVLHHPGMNHRVEITEGILADECAALLCRFFRMPRRVFNAQKKAQSSTDSGGSSGGSSGSETPGTSESATPESSGGSSGGSDKKYSIGLAIGTNSVGWAVITDEYKVPSKKFKVLGNTDRHSIKKNLIGALLFDSGETAEATRLKRTARRRYTRRKNRICYLQEIFSNEMAKVDDSFFHRLEESFLVEEDKKHERHPIFGNIVDEVAYHEKYPTIYHLRKKLVDSTDKADLRLIYLALAHMIKFRGHFLIEGDLNPDNSDVDKLFIQLVQTYNQLFEENPINASGVDAKAILSARLSKSRRLENLIAQLPGEKKNGLFGNLIALSLGLTPNFKSNFDLAEDAKLQLSKDTYDDDLDNLLAQIGDQYADLFLAAKNLSDAILLSDILRVNTEITKAPLSASMIKRYDEHHQDLTLLKALVRQQLPEKYKEIFFDQSKNGYAGYIDGGASQEEFYKFIKPILEKMDGTEELLVKLNREDLLRKQRTFDNGSIPHQIHLGELHAILRRQEDFYPFLKDNREKIEKILTFRIPYYVGPLARGNSRFAWMTRKSEETITPWNFEEVVDKGASAQSFIERMTNFDKNLPNEKVLPKHSLLYEYFTVYNELTKVKYVTEGMRKPAFLSGEQKKAIVDLLFKTNRKVTVKQLKEDYFKKIECFDSVEISGVEDRFNASLGTYHDLLKIIKDKDFLDNEENEDILEDIVLTLTLFEDREMIEERLKTYAHLFDDKVMKQLKRRRYTGWGRLSRKLINGIRDKQSGKTILDFLKSDGFANRNFMQLIHDDSLTFKEDIQKAQVSGQGDSLHEHIANLAGSPAIKKGILQTVKVVDELVKVMGRHKPENIVIEMARENQTTQKGQKNSRERMKRIEEGIKELGSQILKEHPVENTQLQNEKLYLYYLQNGRDMYVDQELDINRLSDYDVDHIVPQSFLKDDSIDNKVLTRSDKNRGKSDNVPSEEVVKKMKNYWRQLLNAKLITQRKFDNLTKAERGGLSELDKAGFIKRQLVETRQITKHVAQILDSRMNTKYDENDKLIREVKVITLKSKLVSDFRKDFQFYKVREINNYHHAHDAYLNAVVGTALIKKYPKLESEFVYGDYKVYDVRKMIAKSEQEIGKATAKYFFYSNIMNFFKTEITLANGEIRKRPLIETNGETGEIVWDKGRDFATVRKVLSMPQVNIVKKTEVQTGGFSKESILPKRNSDKLIARKKDWDPKKYGGFDSPTVAYSVLVVAKVEKGKSKKLKSVKELLGITIMERSSFEKNPIDFLEAKGYKEVKKDLIIKLPKYSLFELENGRKRMLASAGELQKGNELALPSKYVNFLYLASHYEKLKGSPEDNEQKQLFVEQHKHYLDEIIEQISEFSKRVILADANLDKVLSAYNKHRDKPIREQAENIIHLFTLTNLGAPAAFKYFDTTIDRKRYTSTKEVLDATLIHQSITGLYETRIDLSQLGGDEGADKRTADGSEFESPKKKRKV

SEQ ID NO: 334 - protein, 1786 aa, synthetic construct
  REGION 1..1786: note = ABE8.8-d polypeptide sequence
  REGION 1..167: note = MISC_FEATURE - Adenosine deaminase sequence
  REGION 168..199: note = MISC_FEATURE - Linker sequence
  REGION 200..365: note = MISC_FEATURE - Adenosine deaminase sequence
  REGION 366..397: note = MISC_FEATURE - Linker sequence
  REGION 398..1764: note = MISC_FEATURE - Sequence derived from Cas9
  REGION 1765..1786: note = MISC_FEATURE - Bipartite nuclear localization sequence
MSEVEFSHEYWMRHALTLAKRAWDEREVPVGAVLVHNNRVIGEGWNRPIGRHDPTAHAEIMALRQGGLVMQNYRLIDATLYVTLEPCVMCAGAMIHSRIGRVVFGARDAKTGAAGSLMDVLHHPGMNHRVEITEGILADECAALLSDFFRMRRQEIKAQKKAQSSTDSGGSSGGSSGSETPGTSESATPESSGGSSGGSSEVEFSHEYWMRHALTLAKRARDEREVPVGAVLVLNNRVIGEGWNRAIGLHDPTAHAEIMALRQGGLVMQNYRLIDATLYVTFEPCVMCAGAMIHSRIGRVVFGVRNAKTGAAGSLMDVLHHPGMNHRVEITEGILADECAALLCRFFRMPRRVFNAQKKAQSSTDSGGSSGGSSGSETPGTSESATPESSGGSSGGSDKKYSIGLAIGTNSVGWAVITDEYKVPSKKFKVLGNTDRHSIKKNLIGALLFDSGETAEATRLKRTARRRYTRRKNRICYLQEIFSNEMAKVDDSFFHRLEESFLVEEDKKHERHPIFGNIVDEVAYHEKYPTIYHLRKKLVDSTDKADLRLIYLALAHMIKFRGHFLIEGDLNPDNSDVDKLFIQLVQTYNQLFEENPINASGVDAKAILSARLSKSRRLENLIAQLPGEKKNGLFGNLIALSLGLTPNFKSNFDLAEDAKLQLSKDTYDDDLDNLLAQIGDQYADLFLAAKNLSDAILLSDILRVNTEITKAPLSASMIKRYDEHHQDLTLLKALVRQQLPEKYKEIFFDQSKNGYAGYIDGGASQEEFYKFIKPILEKMDGTEELLVKLNREDLLRKQRTFDNGSIPHQIHLGELHAILRRQEDFYPFLKDNREKIEKILTFRIPYYVGPLARGNSRFAWMTRKSEETITPWNFEEVVDKGASAQSFIERMTNFDKNLPNEKVLPKHSLLYEYFTVYNELTKVKYVTEGMRKPAFLSGEQKKAIVDLLFKTNRKVTVKQLKEDYFKKIECFDSVEISGVEDRFNASLGTYHDLLKIIKDKDFLDNEENEDILEDIVLTLTLFEDREMIEERLKTYAHLFDDKVMKQLKRRRYTGWGRLSRKLINGIRDKQSGKTILDFLKSDGFANRNFMQLIHDDSLTFKEDIQKAQVSGQGDSLHEHIANLAGSPAIKKGILQTVKVVDELVKVMGRHKPENIVIEMARENQTTQKGQKNSRERMKRIEEGIKELGSQILKEHPVENTQLQNEKLYLYYLQNGRDMYVDQELDINRLSDYDVDHIVPQSFLKDDSIDNKVLTRSDKNRGKSDNVPSEEVVKKMKNYWRQLLNAKLITQRKFDNLTKAERGGLSELDKAGFIKRQLVETRQITKHVAQILDSRMNTKYDENDKLIREVKVITLKSKLVSDFRKDFQFYKVREINNYHHAHDAYLNAVVGTALIKKYPKLESEFVYGDYKVYDVRKMIAKSEQEIGKATAKYFFYSNIMNFFKTEITLANGEIRKRPLIETNGETGEIVWDKGRDFATVRKVLSMPQVNIVKKTEVQTGGFSKESILPKRNSDKLIARKKDWDPKKYGGFDSPTVAYSVLVVAKVEKGKSKKLKSVKELLGITIMERSSFEKNPIDFLEAKGYKEVKKDLIIKLPKYSLFELENGRKRMLASAGELQKGNELALPSKYVNFLYLASHYEKLKGSPEDNEQKQLFVEQHKHYLDEIIEQISEFSKRVILADANLDKVLSAYNKHRDKPIREQAENIIHLFTLTNLGAPAAFKYFDTTIDRKRYTSTKEVLDATLIHQSITGLYETRIDLSQLGGDEGADKRTADGSEFESPKKKRKV

SEQ ID NO: 335 - protein, 1588 aa, synthetic construct
  REGION 1..1588: note = ABE8.13-m polypeptide sequence
  REGION 1..167: note = MISC_FEATURE - Adenosine deaminase sequence
  REGION 168..199: note = MISC_FEATURE - Linker sequence
  REGION 200..1566: note = MISC_FEATURE - Sequence derived from Cas9
  REGION 1567..1588: note = MISC_FEATURE - Bipartite nuclear localization sequence
MSEVEFSHEYWMRHALTLAKRARDEREVPVGAVLVLNNRVIGEGWNRAIGLHDPTAHAEIMALRQGGLVMQNYRLYDATLYVTFEPCVMCAGAMIHSRIGRVVFGVRNAKTGAAGSLMDVLHHPGMNHRVEITEGILADECAALLCRFFRMPRRVFNAQKKAQSSTDSGGSSGGSSGSETPGTSESATPESSGGSSGGSDKKYSIGLAIGTNSVGWAVITDEYKVPSKKFKVLGNTDRHSIKKNLIGALLFDSGETAEATRLKRTARRRYTRRKNRICYLQEIFSNEMAKVDDSFFHRLEESFLVEEDKKHERHPIFGNIVDEVAYHEKYPTIYHLRKKLVDSTDKADLRLIYLALAHMIKFRGHFLIEGDLNPDNSDVDKLFIQLVQTYNQLFEENPINASGVDAKAILSARLSKSRRLENLIAQLPGEKKNGLFGNLIALSLGLTPNFKSNFDLAEDAKLQLSKDTYDDDLDNLLAQIGDQYADLFLAAKNLSDAILLSDILRVNTEITKAPLSASMIKRYDEHHQDLTLLKALVRQQLPEKYKEIFFDQSKNGYAGYIDGGASQEEFYKFIKPILEKMDGTEELLVKLNREDLLRKQRTFDNGSIPHQIHLGELHAILRRQEDFYPFLKDNREKIEKILTFRIPYYVGPLARGNSRFAWMTRKSEETITPWNFEEVVDKGASAQSFIERMTNFDKNLPNEKVLPKHSLLYEYFTVYNELTKVKYVTEGMRKPAFLSGEQKKAIVDLLFKTNRKVTVKQLKEDYFKKIECFDSVEISGVEDRFNASLGTYHDLLKIIKDKDFLDNEENEDILEDIVLTLTLFEDREMIEERLKTYAHLFDDKVMKQLKRRRYTGWGRLSRKLINGIRDKQSGKTILDFLKSDGFANRNFMQLIHDDSLTFKEDIQKAQVSGQGDSLHEHIANLAGSPAIKKGILQTVKVVDELVKVMGRHKPENIVIEMARENQTTQKGQKNSRERMKRIEEGIKELGSQILKEHPVENTQLQNEKLYLYYLQNGRDMYVDQELDINRLSDYDVDHIVPQSFLKDDSIDNKVLTRSDKNRGKSDNVPSEEVVKKMKNYWRQLLNAKLITQRKFDNLTKAERGGLSELDKAGFIKRQLVETRQITKHVAQILDSRMNTKYDENDKLIREVKVITLKSKLVSDFRKDFQFYKVREINNYHHAHDAYLNAVVGTALIKKYPKLESEFVYGDYKVYDVRKMIAKSEQEIGKATAKYFFYSNIMNFFKTEITLANGEIRKRPLIETNGETGEIVWDKGRDFATVRKVLSMPQVNIVKKTEVQTGGFSKESILPKRNSDKLIARKKDWDPKKYGGFDSPTVAYSVLVVAKVEKGKSKKLKSVKELLGITIMERSSFEKNPIDFLEAKGYKEVKKDLIIKLPKYSLFELENGRKRMLASAGELQKGNELALPSKYVNFLYLASHYEKLKGSPEDNEQKQLFVEQHKHYLDEIIEQISEFSKRVILADANLDKVLSAYNKHRDKPIREQAENIIHLFTLTNLGAPAAFKYFDTTIDRKRYTSTKEVLDATLIHQSITGLYETRIDLSQLGGDEGADKRTADGSEFESPKKKRKV

SEQ ID NO: 336 - protein, 1786 aa, synthetic construct
  REGION 1..1786: note = ABE8.13-d polypeptide sequence
  REGION 1..167: note = MISC_FEATURE - Adenosine deaminase sequence
  REGION 168..199: note = MISC_FEATURE - Linker sequence
  REGION 200..365: note = MISC_FEATURE - Adenosine deaminase sequence
  REGION 366..397: note = MISC_FEATURE - Linker sequence
  REGION 398..1764: note = MISC_FEATURE - Sequence derived from Cas9
  REGION 1765..1786: note = MISC_FEATURE - Bipartite nuclear localization sequence
MSEVEFSHEYWMRHALTLAKRAWDEREVPVGAVLVHNNRVIGEGWNRPIGRHDPTAHAEIMALRQGGLVMQNYRLIDATLYVTLEPCVMCAGAMIHSRIGRVVFGARDAKTGAAGSLMDVLHHPGMNHRVEITEGILADECAALLSDFFRMRRQEIKAQKKAQSSTDSGGSSGGSSGSETPGTSESATPESSGGSSGGSSEVEFSHEYWMRHALTLAKRARDEREVPVGAVLVLNNRVIGEGWNRAIGLHDPTAHAEIMALRQGGLVMQNYRLYDATLYVTFEPCVMCAGAMIHSRIGRVVFGVRNAKTGAAGSLMDVLHHPGMNHRVEITEGILADECAALLCRFFRMPRRVFNAQKKAQSSTDSGGSSGGSSGSETPGTSESATPESSGGSSGGSDKKYSIGLAIGTNSVGWAVITDEYKVPSKKFKVLGNTDRHSIKKNLIGALLFDSGETAEATRLKRTARRRYTRRKNRICYLQEIFSNEMAKVDDSFFHRLEESFLVEEDKKHERHPIFGNIVDEVAYHEKYPTIYHLRKKLVDSTDKADLRLIYLALAHMIKFRGHFLIEGDLNPDNSDVDKLFIQLVQTYNQLFEENPINASGVDAKAILSARLSKSRRLENLIAQLPGEKKNGLFGNLIALSLGLTPNFKSNFDLAEDAKLQLSKDTYDDDLDNLLAQIGDQYADLFLAAKNLSDAILLSDILRVNTEITKAPLSASMIKRYDEHHQDLTLLKALVRQQLPEKYKEIFFDQSKNGYAGYIDGGASQEEFYKFIKPILEKMDGTEELLVKLNREDLLRKQRTFDNGSIPHQIHLGELHAILRRQEDFYPFLKDNREKIEKILTFRIPYYVGPLARGNSRFAWMTRKSEETITPWNFEEVVDKGASAQSFIERMTNFDKNLPNEKVLPKHSLLYEYFTVYNELTKVKYVTEGMRKPAFLSGEQKKAIVDLLFKTNRKVTVKQLKEDYFKKIECFDSVEISGVEDRFNASLGTYHDLLKIIKDKDFLDNEENEDILEDIVLTLTLFEDREMIEERLKTYAHLFDDKVMKQLKRRRYTGWGRLSRKLINGIRDKQSGKTILDFLKSDGFANRNFMQLIHDDSLTFKEDIQKAQVSGQGDSLHEHIANLAGSPAIKKGILQTVKVVDELVKVMGRHKPENIVIEMARENQTTQKGQKNSRERMKRIEEGIKELGSQILKEHPVENTQLQNEKLYLYYLQNGRDMYVDQELDINRLSDYDVDHIVPQSFLKDDSIDNKVLTRSDKNRGKSDNVPSEEVVKKMKNYWRQLLNAKLITQRKFDNLTKAERGGLSELDKAGFIKRQLVETRQITKHVAQILDSRMNTKYDENDKLIREVKVITLKSKLVSDFRKDFQFYKVREINNYHHAHDAYLNAVVGTALIKKYPKLESEFVYGDYKVYDVRKMIAKSEQEIGKATAKYFFYSNIMNFFKTEITLANGEIRKRPLIETNGETGEIVWDKGRDFATVRKVLSMPQVNIVKKTEVQTGGFSKESILPKRNSDKLIARKKDWDPKKYGGFDSPTVAYSVLVVAKVEKGKSKKLKSVKELLGITIMERSSFEKNPIDFLEAKGYKEVKKDLIIKLPKYSLFELENGRKRMLASAGELQKGNELALPSKYVNFLYLASHYEKLKGSPEDNEQKQLFVEQHKHYLDEIIEQISEFSKRVILADANLDKVLSAYNKHRDKPIREQAENIIHLFTLTNLGAPAAFKYFDTTIDRKRYTSTKEVLDATLIHQSITGLYETRIDLSQLGGDEGADKRTADGSEFESPKKKRKV

SEQ ID NO: 337 - protein, 1588 aa, synthetic construct
  REGION 1..1588: note = ABE8.17-m polypeptide sequence
  REGION 1..167: note = MISC_FEATURE - Adenosine deaminase sequence
  REGION 168..199: note = MISC_FEATURE - Linker sequence
  REGION 200..1566: note = MISC_FEATURE - Sequence derived from Cas9
  REGION 1567..1588: note = MISC_FEATURE - Bipartite nuclear localization sequence
MSEVEFSHEYWMRHALTLAKRARDEREVPVGAVLVLNNRVIGEGWNRAIGLHDPTAHAEIMALRQGGLVMQNYRLIDATLYSTFEPCVMCAGAMIHSRIGRVVFGVRNAKTGAAGSLMDVLHYPGMNHRVEITEGILADECAALLCYFFRMPRRVFNAQKKAQSSTDSGGSSGGSSGSETPGTSESATPESSGGSSGGSDKKYSIGLAIGTNSVGWAVITDEYKVPSKKFKVLGNTDRHSIKKNLIGALLFDSGETAEATRLKRTARRRYTRRKNRICYLQEIFSNEMAKVDDSFFHRLEESFLVEEDKKHERHPIFGNIVDEVAYHEKYPTIYHLRKKLVDSTDKADLRLIYLALAHMIKFRGHFLIEGDLNPDNSDVDKLFIQLVQTYNQLFEENPINASGVDAKAILSARLSKSRRLENLIAQLPGEKKNGLFGNLIALSLGLTPNFKSNFDLAEDAKLQLSKDTYDDDLDNLLAQIGDQYADLFLAAKNLSDAILLSDILRVNTEITKAPLSASMIKRYDEHHQDLTLLKALVRQQLPEKYKEIFFDQSKNGYAGYIDGGASQEEFYKFIKPILEKMDGTEELLVKLNREDLLRKQRTFDNGSIPHQIHLGELHAILRRQEDFYPFLKDNREKIEKILTFRIPYYVGPLARGNSRFAWMTRKSEETITPWNFEEVVDKGASAQSFIERMTNFDKNLPNEKVLPKHSLLYEYFTVYNELTKVKYVTEGMRKPAFLSGEQKKAIVDLLFKTNRKVTVKQLKEDYFKKIECFDSVEISGVEDRFNASLGTYHDLLKIIKDKDFLDNEENEDILEDIVLTLTLFEDREMIEERLKTYAHLFDDKVMKQLKRRRYTGWGRLSRKLINGIRDKQSGKTILDFLKSDGFANRNFMQLIHDDSLTFKEDIQKAQVSGQGDSLHEHIANLAGSPAIKKGILQTVKVVDELVKVMGRHKPENIVIEMARENQTTQKGQKNSRERMKRIEEGIKELGSQILKEHPVENTQLQNEKLYLYYLQNGRDMYVDQELDINRLSDYDVDHIVPQSFLKDDSIDNKVLTRSDKNRGKSDNVPSEEVVKKMKNYWRQLLNAKLITQRKFDNLTKAERGGLSELDKAGFIKRQLVETRQITKHVAQILDSRMNTKYDENDKLIREVKVITLKSKLVSDFRKDFQFYKVREINNYHHAHDAYLNAVVGTALIKKYPKLESEFVYGDYKVYDVRKMIAKSEQEIGKATAKYFFYSNIMNFFKTEITLANGEIRKRPLIETNGETGEIVWDKGRDFATVRKVLSMPQVNIVKKTEVQTGGFSKESILPKRNSDKLIARKKDWDPKKYGGFDSPTVAYSVLVVAKVEKGKSKKLKSVKELLGITIMERSSFEKNPIDFLEAKGYKEVKKDLIIKLPKYSLFELENGRKRMLASAGELQKGNELALPSKYVNFLYLASHYEKLKGSPEDNEQKQLFVEQHKHYLDEIIEQISEFSKRVILADANLDKVLSAYNKHRDKPIREQAENIIHLFTLTNLGAPAAFKYFDTTIDRKRYTSTKEVLDATLIHQSITGLYETRIDLSQLGGDEGADKRTADGSEFESPKKKRKV

SEQ ID NO: 338 - protein, 1786 aa, synthetic construct
  REGION 1..1786: note = ABE8.17-d polypeptide sequence
  REGION 1..167: note = MISC_FEATURE - Adenosine deaminase sequence
  REGION 168..199: note = MISC_FEATURE - Linker sequence
  REGION 200..365: note = MISC_FEATURE - Adenosine deaminase sequence
  REGION 366..397: note = MISC_FEATURE - Linker sequence
  REGION 398..1764: note = MISC_FEATURE - Sequence derived from Cas9
  REGION 1765..1786: note = MISC_FEATURE - Bipartite nuclear localization sequence
MSEVEFSHEYWMRHALTLAKRAWDEREVPVGAVLVHNNRVIGEGWNRPIGRHDPTAHAEIMALRQGGLVMQNYRLIDATLYVTLEPCVMCAGAMIHSRIGRVVFGARDAKTGAAGSLMDVLHHPGMNHRVEITEGILADECAALLSDFFRMRRQEIKAQKKAQSSTDSGGSSGGSSGSETPGTSESATPESSGGSSGGSSEVEFSHEYWMRHALTLAKRARDEREVPVGAVLVLNNRVIGEGWNRAIGLHDPTAHAEIMALRQGGLVMQNYRLIDATLYSTFEPCVMCAGAMIHSRIGRVVFGVRNAKTGAAGSLMDVLHYPGMNHRVEITEGILADECAALLCYFFRMPRRVFNAQKKAQSSTDSGGSSGGSSGSETPGTSESATPESSGGSSGGSDKKYSIGLAIGTNSVGWAVITDEYKVPSKKFKVLGNTDRHSIKKNLIGALLFDSGETAEATRLKRTARRRYTRRKNRICYLQEIFSNEMAKVDDSFFHRLEESFLVEEDKKHERHPIFGNIVDEVAYHEKYPTIYHLRKKLVDSTDKADLRLIYLALAHMIKFRGHFLIEGDLNPDNSDVDKLFIQLVQTYNQLFEENPINASGVDAKAILSARLSKSRRLENLIAQLPGEKKNGLFGNLIALSLGLTPNFKSNFDLAEDAKLQLSKDTYDDDLDNLLAQIGDQYADLFLAAKNLSDAILLSDILRVNTEITKAPLSASMIKRYDEHHQDLTLLKALVRQQLPEKYKEIFFDQSKNGYAGYIDGGASQEEFYKFIKPILEKMDGTEELLVKLNREDLLRKQRTFDNGSIPHQIHLGELHAILRRQEDFYPFLKDNREKIEKILTFRIPYYVGPLARGNSRFAWMTRKSEETITPWNFEEVVDKGASAQSFIERMTNFDKNLPNEKVLPKHSLLYEYFTVYNELTKVKYVTEGMRKPAFLSGEQKKAIVDLLFKTNRKVTVKQLKEDYFKKIECFDSVEISGVEDRFNASLGTYHDLLKIIKDKDFLDNEENEDILEDIVLTLTLFEDREMIEERLKTYAHLFDDKVMKQLKRRRYTGWGRLSRKLINGIRDKQSGKTILDFLKSDGFANRNFMQLIHDDSLTFKEDIQKAQVSGQGDSLHEHIANLAGSPAIKKGILQTVKVVDELVKVMGRHKPENIVIEMARENQTTQKGQKNSRERMKRIEEGIKELGSQILKEHPVENTQLQNEKLYLYYLQNGRDMYVDQELDINRLSDYDVDHIVPQSFLKDDSIDNKVLTRSDKNRGKSDNVPSEEVVKKMKNYWRQLLNAKLITQRKFDNLTKAERGGLSELDKAGFIKRQLVETRQITKHVAQILDSRMNTKYDENDKLIREVKVITLKSKLVSDFRKDFQFYKVREINNYHHAHDAYLNAVVGTALIKKYPKLESEFVYGDYKVYDVRKMIAKSEQEIGKATAKYFFYSNIMNFFKTEITLANGEIRKRPLIETNGETGEIVWDKGRDFATVRKVLSMPQVNIVKKTEVQTGGFSKESILPKRNSDKLIARKKDWDPKKYGGFDSPTVAYSVLVVAKVEKGKSKKLKSVKELLGITIMERSSFEKNPIDFLEAKGYKEVKKDLIIKLPKYSLFELENGRKRMLASAGELQKGNELALPSKYVNFLYLASHYEKLKGSPEDNEQKQLFVEQHKHYLDEIIEQISEFSKRVILADANLDKVLSAYNKHRDKPIREQAENIIHLFTLTNLGAPAAFKYFDTTIDRKRYTSTKEVLDATLIHQSITGLYETRIDLSQLGGDEGADKRTADGSEFESPKKKRKV

SEQ ID NO: 339 - protein, 1588 aa, synthetic construct
  REGION 1..1588: note = ABE8.20-m polypeptide sequence
  REGION 1..167: note = MISC_FEATURE - Adenosine deaminase sequence
  REGION 168..199: note = MISC_FEATURE - Linker sequence
  REGION 200..1566: note = MISC_FEATURE - Sequence derived from Cas9
  REGION 1567..1588: note = MISC_FEATURE - Bipartite nuclear localization sequence
MSEVEFSHEYWMRHALTLAKRARDEREVPVGAVLVLNNRVIGEGWNRAIGLHDPTAHAEIMALRQGGLVMQNYRLYDATLYSTFEPCVMCAGAMIHSRIGRVVFGVRNAKTGAAGSLMDVLHHPGMNHRVEITEGILADECAALLCRFFRMPRRVFNAQKKAQSSTDSGGSSGGSSGSETPGTSESATPESSGGSSGGSDKKYSIGLAIGTNSVGWAVITDEYKVPSKKFKVLGNTDRHSIKKNLIGALLFDSGETAEATRLKRTARRRYTRRKNRICYLQEIFSNEMAKVDDSFFHRLEESFLVEEDKKHERHPIFGNIVDEVAYHEKYPTIYHLRKKLVDSTDKADLRLIYLALAHMIKFRGHFLIEGDLNPDNSDVDKLFIQLVQTYNQLFEENPINASGVDAKAILSARLSKSRRLENLIAQLPGEKKNGLFGNLIALSLGLTPNFKSNFDLAEDAKLQLSKDTYDDDLDNLLAQIGDQYADLFLAAKNLSDAILLSDILRVNTEITKAPLSASMIKRYDEHHQDLTLLKALVRQQLPEKYKEIFFDQSKNGYAGYIDGGASQEEFYKFIKPILEKMDGTEELLVKLNREDLLRKQRTFDNGSIPHQIHLGELHAILRRQEDFYPFLKDNREKIEKILTFRIPYYVGPLARGNSRFAWMTRKSEETITPWNFEEVVDKGASAQSFIERMTNFDKNLPNEKVLPKHSLLYEYFTVYNELTKVKYVTEGMRKPAFLSGEQKKAIVDLLFKTNRKVTVKQLKEDYFKKIECFDSVEISGVEDRFNASLGTYHDLLKIIKDKDFLDNEENEDILEDIVLTLTLFEDREMIEERLKTYAHLFDDKVMKQLKRRRYTGWGRLSRKLINGIRDKQSGKTILDFLKSDGFANRNFMQLIHDDSLTFKEDIQKAQVSGQGDSLHEHIANLAGSPAIKKGILQTVKVVDELVKVMGRHKPENIVIEMARENQTTQKGQKNSRERMKRIEEGIKELGSQILKEHPVENTQLQNEKLYLYYLQNGRDMYVDQELDINRLSDYDVDHIVPQSFLKDDSIDNKVLTRSDKNRGKSDNVPSEEVVKKMKNYWRQLLNAKLITQRKFDNLTKAERGGLSELDKAGFIKRQLVETRQITKHVAQILDSRMNTKYDENDKLIREVKVITLKSKLVSDFRKDFQFYKVREINNYHHAHDAYLNAVVGTALIKKYPKLESEFVYGDYKVYDVRKMIAKSEQEIGKATAKYFFYSNIMNFFKTEITLANGEIRKRPLIETNGETGEIVWDKGRDFATVRKVLSMPQVNIVKKTEVQTGGFSKESILPKRNSDKLIARKKDWDPKKYGGFDSPTVAYSVLVVAKVEKGKSKKLKSVKELLGITIMERSSFEKNPIDFLEAKGYKEVKKDLIIKLPKYSLFELENGRKRMLASAGELQKGNELALPSKYVNFLYLASHYEKLKGSPEDNEQKQLFVEQHKHYLDEIIEQISEFSKRVILADANLDKVLSAYNKHRDKPIREQAENIIHLFTLTNLGAPAAFKYFDTTIDRKRYTSTKEVLDATLIHQSITGLYETRIDLSQLGGDEGADKRTADGSEFESPKKKRKV

SEQ ID NO: 340 - protein, 1786 aa, synthetic construct
  REGION 1..1786: note = ABE8.20-d polypeptide sequence
  REGION 1..167: note = MISC_FEATURE - Adenosine deaminase sequence
  REGION 168..199: note = MISC_FEATURE - Linker sequence
  REGION 200..365: note = MISC_FEATURE - Adenosine deaminase sequence
  REGION 366..397: note = MISC_FEATURE - Linker sequence
  REGION 398..1764: note = MISC_FEATURE - Sequence derived from Cas9
  REGION 1765..1786: note = MISC_FEATURE - Bipartite nuclear localization sequence
MSEVEFSHEYWMRHALTLAKRAWDEREVPVGAVLVHNNRVIGEGWNRPIGRHDPTAHAEIMALRQGGLVMQNYRLIDATLYVTLEPCVMCAGAMIHSRIGRVVFGARDAKTGAAGSLMDVLHHPGMNHRVEITEGILADECAALLSDFFRMRRQEIKAQKKAQSSTDSGGSSGGSSGSETPGTSESATPESSGGSSGGSSEVEFSHEYWMRHALTLAKRARDEREVPVGAVLVLNNRVIGEGWNRAIGLHDPTAHAEIMALRQGGLVMQNYRLYDATLYSTFEPCVMCAGAMIHSRIGRVVFGVRNAKTGAAGSLMDVLHHPGMNHRVEITEGILADECAALLCRFFRMPRRVFNAQKKAQSSTDSGGSSGGSSGSETPGTSESATPESSGGSSGGSDKKYSIGLAIGTNSVGWAVITDEYKVPSKKFKVLGNTDRHSIKKNLIGALLFDSGETAEATRLKRTARRRYTRRKNRICYLQEIFSNEMAKVDDSFFHRLEESFLVEEDKKHERHPIFGNIVDEVAYHEKYPTIYHLRKKLVDSTDKADLRLIYLALAHMIKFRGHFLIEGDLNPDNSDVDKLFIQLVQTYNQLFEENPINASGVDAKAILSARLSKSRRLENLIAQLPGEKKNGLFGNLIALSLGLTPNFKSNFDLAEDAKLQLSKDTYDDDLDNLLAQIGDQYADLFLAAKNLSDAILLSDILRVNTEITKAPLSASMIKRYDEHHQDLTLLKALVRQQLPEKYKEIFFDQSKNGYAGYIDGGASQEEFYKFIKPILEKMDGTEELLVKLNREDLLRKQRTFDNGSIPHQIHLGELHAILRRQEDFYPFLKDNREKIEKILTFRIPYYVGPLARGNSRFAWMTRKSEETITPWNFEEVVDKGASAQSFIERMTNFDKNLPNEKVLPKHSLLYEYFTVYNELTKVKYVTEGMRKPAFLSGEQKKAIVDLLFKTNRKVTVKQLKEDYFKKIECFDSVEISGVEDRFNASLGTYHDLLKIIKDKDFLDNEENEDILEDIVLTLTLFEDREMIEERLKTYAHLFDDKVMKQLKRRRYTGWGRLSRKLINGIRDKQSGKTILDFLKSDGFANRNFMQLIHDDSLTFKEDIQKAQVSGQGDSLHEHIANLAGSPAIKKGILQTVKVVDELVKVMGRHKPENIVIEMARENQTTQKGQKNSRERMKRIEEGIKELGSQILKEHPVENTQLQNEKLYLYYLQNGRDMYVDQELDINRLSDYDVDHIVPQSFLKDDSIDNKVLTRSDKNRGKSDNVPSEEVVKKMKNYWRQLLNAKLITQRKFDNLTKAERGGLSELDKAGFIKRQLVETRQITKHVAQILDSRMNTKYDENDKLIREVKVITLKSKLVSDFRKDFQFYKVREINNYHHAHDAYLNAVVGTALIKKYPKLESEFVYGDYKVYDVRKMIAKSEQEIGKATAKYFFYSNIMNFFKTEITLANGEIRKRPLIETNGETGEIVWDKGRDFATVRKVLSMPQVNIVKKTEVQTGGFSKESILPKRNSDKLIARKKDWDPKKYGGFDSPTVAYSVLVVAKVEKGKSKKLKSVKELLGITIMERSSFEKNPIDFLEAKGYKEVKKDLIIKLPKYSLFELENGRKRMLASAGELQKGNELALPSKYVNFLYLASHYEKLKGSPEDNEQKQLFVEQHKHYLDEIIEQISEFSKRVILADANLDKVLSAYNKHRDKPIREQAENIIHLFTLTNLGAPAAFKYFDTTIDRKRYTSTKEVLDATLIHQSITGLYETRIDLSQLGGDEGADKRTADGSEFESPKKKRKV

SEQ ID NO: 341 - protein, 1588 aa, synthetic construct
  REGION 1..1588: note = 01. monoABE8.1_bpNLS + Y147T polypeptide sequence
MSEVEFSHEYWMRHALTLAKRARDEREVPVGAVLVLNNRVIGEGWNRAIGLHDPTAHAEIMALRQGGLVMQNYRLIDATLYVTFEPCVMCAGAMIHSRIGRVVFGVRNAKTGAAGSLMDVLHYPGMNHRVEITEGILADECAALLCTFFRMPRQVFNAQKKAQSSTDSGGSSGGSSGSETPGTSESATPESSGGSSGGSDKKYSIGLAIGTNSVGWAVITDEYKVPSKKFKVLGNTDRHSIKKNLIGALLFDSGETAEATRLKRTARRRYTRRKNRICYLQEIFSNEMAKVDDSFFHRLEESFLVEEDKKHERHPIFGNIVDEVAYHEKYPTIYHLRKKLVDSTDKADLRLIYLALAHMIKFRGHFLIEGDLNPDNSDVDKLFIQLVQTYNQLFEENPINASGVDAKAILSARLSKSRRLENLIAQLPGEKKNGLFGNLIALSLGLTPNFKSNFDLAEDAKLQLSKDTYDDDLDNLLAQIGDQYADLFLAAKNLSDAILLSDILRVNTEITKAPLSASMIKRYDEHHQDLTLLKALVRQQLPEKYKEIFFDQSKNGYAGYIDGGASQEEFYKFIKPILEKMDGTEELLVKLNREDLLRKQRTFDNGSIPHQIHLGELHAILRRQEDFYPFLKDNREKIEKILTFRIPYYVGPLARGNSRFAWMTRKSEETITPWNFEEVVDKGASAQSFIERMTNFDKNLPNEKVLPKHSLLYEYFTVYNELTKVKYVTEGMRKPAFLSGEQKKAIVDLLFKTNRKVTVKQLKEDYFKKIECFDSVEISGVEDRFNASLGTYHDLLKIIKDKDFLDNEENEDILEDIVLTLTLFEDREMIEERLKTYAHLFDDKVMKQLKRRRYTGWGRLSRKLINGIRDKQSGKTILDFLKSDGFANRNFMQLIHDDSLTFKEDIQKAQVSGQGDSLHEHIANLAGSPAIKKGILQTVKVVDELVKVMGRHKPENIVIEMARENQTTQKGQKNSRERMKRIEEGIKELGSQILKEHPVENTQLQNEKLYLYYLQNGRDMYVDQELDINRLSDYDVDHIVPQSFLKDDSIDNKVLTRSDKNRGKSDNVPSEEVVKKMKNYWRQLLNAKLITQRKFDNLTKAERGGLSELDKAGFIKRQLVETRQITKHVAQILDSRMNTKYDENDKLIREVKVITLKSKLVSDFRKDFQFYKVREINNYHHAHDAYLNAVVGTALIKKYPKLESEFVYGDYKVYDVRKMIAKSEQEIGKATAKYFFYSNIMNFFKTEITLANGEIRKRPLIETNGETGEIVWDKGRDFATVRKVLSMPQVNIVKKTEVQTGGFSKESILPKRNSDKLIARKKDWDPKKYGGFVSPTVAYSVLVVAKVEKGKSKKLKSVKELLGITIMERSSFEKNPIDFLEAKGYKEVKKDLIIKLPKYSLFELENGRKRMLASARELQKGNELALPSKYVNFLYLASHYEKLKGSPEDNEQKQLFVEQHKHYLDEIIEQISEFSKRVILADANLDKVLSAYNKHRDKPIREQAENIIHLFTLTNLGAPAAFKYFDTTIDRKQYRSTKEVLDATLIHQSITGLYETRIDLSQLGGDEGADKRTADGSEFESPKKKRKV

SEQ ID NO: 342 - protein, 1588 aa, synthetic construct
  REGION 1..1588: note = 02. monoABE8.1_bpNLS + Y147R polypeptide sequence
MSEVEFSHEYWMRHALTLAKRARDEREVPVGAVLVLNNRVIGEGWNRAIGLHDPTAHAEIMALRQGGLVMQNYRLIDATLYVTFEPCVMCAGAMIHSRIGRVVFGVRNAKTGAAGSLMDVLHYPGMNHRVEITEGILADECAALLCRFFRMPRQVFNAQKKAQSSTDSGGSSGGSSGSETPGTSESATPESSGGSSGGSDKKYSIGLAIGTNSVGWAVITDEYKVPSKKFKVLGNTDRHSIKKNLIGALLFDSGETAEATRLKRTARRRYTRRKNRICYLQEIFSNEMAKVDDSFFHRLEESFLVEEDKKHERHPIFGNIVDEVAYHEKYPTIYHLRKKLVDSTDKADLRLIYLALAHMIKFRGHFLIEGDLNPDNSDVDKLFIQLVQTYNQLFEENPINASGVDAKAILSARLSKSRRLENLIAQLPGEKKNGLFGNLIALSLGLTPNFKSNFDLAEDAKLQLSKDTYDDDLDNLLAQIGDQYADLFLAAKNLSDAILLSDILRVNTEITKAPLSASMIKRYDEHHQDLTLLKALVRQQLPEKYKEIFFDQSKNGYAGYIDGGASQEEFYKFIKPILEKMDGTEELLVKLNREDLLRKQRTFDNGSIPHQIHLGELHAILRRQEDFYPFLKDNREKIEKILTFRIPYYVGPLARGNSRFAWMTRKSEETITPWNFEEVVDKGASAQSFIERMTNFDKNLPNEKVLPKHSLLYEYFTVYNELTKVKYVTEGMRKPAFLSGEQKKAIVDLLFKTNRKVTVKQLKEDYFKKIECFDSVEISGVEDRFNASLGTYHDLLKIIKDKDFLDNEENEDILEDIVLTLTLFEDREMIEERLKTYAHLFDDKVMKQLKRRRYTGWGRLSRKLINGIRDKQSGKTILDFLKSDGFANRNFMQLIHDDSLTFKEDIQKAQVSGQGDSLHEHIANLAGSPAIKKGILQTVKVVDELVKVMGRHKPENIVIEMARENQTTQKGQKNSRERMKRIEEGIKELGSQILKEHPVENTQLQNEKLYLYYLQNGRDMYVDQELDINRLSDYDVDHIVPQSFLKDDSIDNKVLTRSDKNRGKSDNVPSEEVVKKMKNYWRQLLNAKLITQRKFDNLTKAERGGLSELDKAGFIKRQLVETRQITKHVAQILDSRMNTKYDENDKLIREVKVITLKSKLVSDFRKDFQFYKVREINNYHHAHDAYLNAVVGTALIKKYPKLESEFVYGDYKVYDVRKMIAKSEQEIGKATAKYFFYSNIMNFFKTEITLANGEIRKRPLIETNGETGEIVWDKGRDFATVRKVLSMPQVNIVKKTEVQTGGFSKESILPKRNSDKLIARKKDWDPKKYGGFVSPTVAYSVLVVAKVEKGKSKKLKSVKELLGITIMERSSFEKNPIDFLEAKGYKEVKKDLIIKLPKYSLFELENGRKRMLASARELQKGNELALPSKYVNFLYLASHYEKLKGSPEDNEQKQLFVEQHKHYLDEIIEQISEFSKRVILADANLDKVLSAYNKHRDKPIREQAENIIHLFTLTNLGAPAAFKYFDTTIDRKQYRSTKEVLDATLIHQSITGLYETRIDLSQLGGDEGADKRTADGSEFESPKKKRKV

SEQ ID NO: 343 - protein, 1588 aa, synthetic construct
  REGION 1..1588: note = 03. monoABE8.1_bpNLS + Q154S polypeptide sequence
MSEVEFSHEYWMRHALTLAKRARDEREVPVGAVLVLNNRVIGEGWNRAIGLHDPTAHAEIMALRQGGLVMQNYRLIDATLYVTFEPCVMCAGAMIHSRIGRVVFGVRNAKTGAAGSLMDVLHYPGMNHRVEITEGILADECAALLCYFFRMPRSVFNAQKKAQSSTDSGGSSGGSSGSETPGTSESATPESSGGSSGGSDKKYSIGLAIGTNSVGWAVITDEYKVPSKKFKVLGNTDRHSIKKNLIGALLFDSGETAEATRLKRTARRRYTRRKNRICYLQEIFSNEMAKVDDSFFHRLEESFLVEEDKKHERHPIFGNIVDEVAYHEKYPTIYHLRKKLVDSTDKADLRLIYLALAHMIKFRGHFLIEGDLNPDNSDVDKLFIQLVQTYNQLFEENPINASGVDAKAILSARLSKSRRLENLIAQLPGEKKNGLFGNLIALSLGLTPNFKSNFDLAEDAKLQLSKDTYDDDLDNLLAQIGDQYADLFLAAKNLSDAILLSDILRVNTEITKAPLSASMIKRYDEHHQDLTLLKALVRQQLPEKYKEIFFDQSKNGYAGYIDGGASQEEFYKFIKPILEKMDGTEELLVKLNREDLLRKQRTFDNGSIPHQIHLGELHAILRRQEDFYPFLKDNREKIEKILTFRIPYYVGPLARGNSRFAWMTRKSEETITPWNFEEVVDKGASAQSFIERMTNFDKNLPNEKVLPKHSLLYEYFTVYNELTKVKYVTEGMRKPAFLSGEQKKAIVDLLFKTNRKVTVKQLKEDYFKKIECFDSVEISGVEDRFNASLGTYHDLLKIIKDKDFLDNEENEDILEDIVLTLTLFEDREMIEERLKTYAHLFDDKVMKQLKRRRYTGWGRLSRKLINGIRDKQSGKTILDFLKSDGFANRNFMQLIHDDSLTFKEDIQKAQVSGQGDSLHEHIANLAGSPAIKKGILQTVKVVDELVKVMGRHKPENIVIEMARENQTTQKGQKNSRERMKRIEEGIKELGSQILKEHPVENTQLQNEKLYLYYLQNGRDMYVDQELDINRLSDYDVDHIVPQSFLKDDSIDNKVLTRSDKNRGKSDNVPSEEVVKKMKNYWRQLLNAKLITQRKFDNLTKAERGGLSELDKAGFIKRQLVETRQITKHVAQILDSRMNTKYDENDKLIREVKVITLKSKLVSDFRKDFQFYKVREINNYHHAHDAYLNAVVGTALIKKYPKLESEFVYGDYKVYDVRKMIAKSEQEIGKATAKYFFYSNIMNFFKTEITLANGEIRKRPLIETNGETGEIVWDKGRDFATVRKVLSMPQVNIVKKTEVQTGGFSKESILPKRNSDKLIARKKDWDPKKYGGFVSPTVAYSVLVVAKVEKGKSKKLKSVKELLGITIMERSSFEKNPIDFLEAKGYKEVKKDLIIKLPKYSLFELENGRKRMLASARELQKGNELALPSKYVNFLYLASHYEKLKGSPEDNEQKQLFVEQHKHYLDEIIEQISEFSKRVILADANLDKVLSAYNKHRDKPIREQAENIIHLFTLTNLGAPAAFKYFDTTIDRKQYRSTKEVLDATLIHQSITGLYETRIDLSQLGGDEGADKRTADGSEFESPKKKRKV

SEQ ID NO: 344 - protein, 1588 aa, synthetic construct
  REGION 1..1588: note = 04. monoABE8.1_bpNLS + Y123H polypeptide sequence
MSEVEFSHEYWMRHALTLAKRARDEREVPVGAVLVLNNRVIGEGWNRAIGLHDPTAHAEIMALRQGGLVMQNYRLIDATLYVTFEPCVMCAGAMIHSRIGRVVFGVRNAKTGAAGSLMDVLHHPGMNHRVEITEGILADECAALLCYFFRMPRQVFNAQKKAQSSTDSGGSSGGSSGSETPGTSESATPESSGGSSGGSDKKYSIGLAIGTNSVGWAVITDEYKVPSKKFKVLGNTDRHSIKKNLIGALLFDSGETAEATRLKRTARRRYTRRKNRICYLQEIFSNEMAKVDDSFFHRLEESFLVEEDKKHERHPIFGNIVDEVAYHEKYPTIYHLRKKLVDSTDKADLRLIYLALAHMIKFRGHFLIEGDLNPDNSDVDKLFIQLVQTYNQLFEENPINASGVDAKAILSARLSKSRRLENLIAQLPGEKKNGLFGNLIALSLGLTPNFKSNFDLAEDAKLQLSKDTYDDDLDNLLAQIGDQYADLFLAAKNLSDAILLSDILRVNTEITKAPLSASMIKRYDEHHQDLTLLKALVRQQLPEKYKEIFFDQSKNGYAGYIDGGASQEEFYKFIKPILEKMDGTEELLVKLNREDLLRKQRTFDNGSIPHQIHLGELHAILRRQEDFYPFLKDNREKIEKILTFRIPYYVGPLARGNSRFAWMTRKSEETITPWNFEEVVDKGASAQSFIERMTNFDKNLPNEKVLPKHSLLYEYFTVYNELTKVKYVTEGMRKPAFLSGEQKKAIVDLLFKTNRKVTVKQLKEDYFKKIECFDSVEISGVEDRFNASLGTYHDLLKIIKDKDFLDNEENEDILEDIVLTLTLFEDREMIEERLKTYAHLFDDKVMKQLKRRRYTGWGRLSRKLINGIRDKQSGKTILDFLKSDGFANRNFMQLIHDDSLTFKEDIQKAQVSGQGDSLHEHIANLAGSPAIKKGILQTVKVVDELVKVMGRHKPENIVIEMARENQTTQKGQKNSRERMKRIEEGIKELGSQILKEHPVENTQLQNEKLYLYYLQNGRDMYVDQELDINRLSDYDVDHIVPQSFLKDDSIDNKVLTRSDKNRGKSDNVPSEEVVKKMKNYWRQLLNAKLITQRKFDNLTKAERGGLSELDKAGFIKRQLVETRQITKHVAQILDSRMNTKYDENDKLIREVKVITLKSKLVSDFRKDFQFYKVREINNYHHAHDAYLNAVVGTALIKKYPKLESEFVYGDYKVYDVRKMIAKSEQEIGKATAKYFFYSNIMNFFKTEITLANGEIRKRPLIETNGETGEIVWDKGRDFATVRKVLSMPQVNIVKKTEVQTGGFSKESILPKRNSDKLIARKKDWDPKKYGGFVSPTVAYSVLVVAKVEKGKSKKLKSVKELLGITIMERSSFEKNPIDFLEAKGYKEVKKDLIIKLPKYSLFELENGRKRMLASARELQKGNELALPSKYVNFLYLASHYEKLKGSPEDNEQKQLFVEQHKHYLDEIIEQISEFSKRVILADANLDKVLSAYNKHRDKPIREQAENIIHLFTLTNLGAPAAFKYFDTTIDRKQYRSTKEVLDATLIHQSITGLYETRIDLSQLGGDEGADKRTADGSEFESPKKKRKV

SEQ ID NO: 345 - protein, 1588 aa, synthetic construct
  REGION 1..1588: note = 05. monoABE8.1_bpNLS + V82S polypeptide sequence
MSEVEFSHEYWMRHALTLAKRARDEREVPVGAVLVLNNRVIGEGWNRAIGLHDPTAHAEIMALRQGGLVMQNYRLIDATLYSTFEPCVMCAGAMIHSRIGRVVFGVRNAKTGAAGSLMDVLHYPGMNHRVEITEGILADECAALLCYFFRMPRQVFNAQKKAQSSTDSGGSSGGSSGSETPGTSESATPESSGGSSGGSDKKYSIGLAIGTNSVGWAVITDEYKVPSKKFKVLGNTDRHSIKKNLIGALLFDSGETAEATRLKRTARRRYTRRKNRICYLQEIFSNEMAKVDDSFFHRLEESFLVEEDKKHERHPIFGNIVDEVAYHEKYPTIYHLRKKLVDSTDKADLRLIYLALAHMIKFRGHFLIEGDLNPDNSDVDKLFIQLVQTYNQLFEENPINASGVDAKAILSARLSKSRRLENLIAQLPGEKKNGLFGNLIALSLGLTPNFKSNFDLAEDAKLQLSKDTYDDDLDNLLAQIGDQYADLFLAAKNLSDAILLSDILRVNTEITKAPLSASMIKRYDEHHQDLTLLKALVRQQLPEKYKEIFFDQSKNGYAGYIDGGASQEEFYKFIKPILEKMDGTEELLVKLNREDLLRKQRTFDNGSIPHQIHLGELHAILRRQEDFYPFLKDNREKIEKILTFRIPYYVGPLARGNSRFAWMTRKSEETITPWNFEEVVDKGASAQSFIERMTNFDKNLPNEKVLPKHSLLYEYFTVYNELTKVKYVTEGMRKPAFLSGEQKKAIVDLLFKTNRKVTVKQLKEDYFKKIECFDSVEISGVEDRFNASLGTYHDLLKIIKDKDFLDNEENEDILEDIVLTLTLFEDREMIEERLKTYAHLFDDKVMKQLKRRRYTGWGRLSRKLINGIRDKQSGKTILDFLKSDGFANRNFMQLIHDDSLTFKEDIQKAQVSGQGDSLHEHIANLAGSPAIKKGILQTVKVVDELVKVMGRHKPENIVIEMARENQTTQKGQKNSRERMKRIEEGIKELGSQILKEHPVENTQLQNEKLYLYYLQNGRDMYVDQELDINRLSDYDVDHIVPQSFLKDDSIDNKVLTRSDKNRGKSDNVPSEEVVKKMKNYWRQLLNAKLITQRKFDNLTKAERGGLSELDKAGFIKRQLVETRQITKHVAQILDSRMNTKYDENDKLIREVKVITLKSKLVSDFRKDFQFYKVREINNYHHAHDAYLNAVVGTALIKKYPKLESEFVYGDYKVYDVRKMIAKSEQEIGKATAKYFFYSNIMNFFKTEITLANGEIRKRPLIETNGETGEIVWDKGRDFATVRKVLSMPQVNIVKKTEVQTGGFSKESILPKRNSDKLIARKKDWDPKKYGGFVSPTVAYSVLVVAKVEKGKSKKLKSVKELLGITIMERSSFEKNPIDFLEAKGYKEVKKDLIIKLPKYSLFELENGRKRMLASARELQKGNELALPSKYVNFLYLASHYEKLKGSPEDNEQKQLFVEQHKHYLDEIIEQISEFSKRVILADANLDKVLSAYNKHRDKPIREQAENIIHLFTLTNLGAPAAFKYFDTTIDRKQYRSTKEVLDATLIHQSITGLYETRIDLSQLGGDEGADKRTADGSEFESPKKKRKV

SEQ ID NO: 346 - protein, 1588 aa, synthetic construct
  REGION 1..1588: note = 06. monoABE8.1_bpNLS + T166R polypeptide sequence
MSEVEFSHEYWMRHALTLAKRARDEREVPVGAVLVLNNRVIGEGWNRAIGLHDPTAHAEIMALRQGGLVMQNYRLIDATLYVTFEPCVMCAGAMIHSRIGRVVFGVRNAKTGAAGSLMDVLHYPGMNHRVEITEGILADECAALLCYFFRMPRQVFNAQKKAQSSRDSGGSSGGSSGSETPGTSESATPESSGGSSGGSDKKYSIGLAIGTNSVGWAVITDEYKVPSKKFKVLGNTDRHSIKKNLIGALLFDSGETAEATRLKRTARRRYTRRKNRICYLQEIFSNEMAKVDDSFFHRLEESFLVEEDKKHERHPIFGNIVDEVAYHEKYPTIYHLRKKLVDSTDKADLRLIYLALAHMIKFRGHFLIEGDLNPDNSDVDKLFIQLVQTYNQLFEENPINASGVDAKAILSARLSKSRRLENLIAQLPGEKKNGLFGNLIALSLGLTPNFKSNFDLAEDAKLQLSKDTYDDDLDNLLAQIGDQYADLFLAAKNLSDAILLSDILRVNTEITKAPLSASMIKRYDEHHQDLTLLKALVRQQLPEKYKEIFFDQSKNGYAGYIDGGASQEEFYKFIKPILEKMDGTEELLVKLNREDLLRKQRTFDNGSIPHQIHLGELHAILRRQEDFYPFLKDNREKIEKILTFRIPYYVGPLARGNSRFAWMTRKSEETITPWNFEEVVDKGASAQSFIERMTNFDKNLPNEKVLPKHSLLYEYFTVYNELTKVKYVTEGMRKPAFLSGEQKKAIVDLLFKTNRKVTVKQLKEDYFKKIECFDSVEISGVEDRFNASLGTYHDLLKIIKDKDFLDNEENEDILEDIVLTLTLFEDREMIEERLKTYAHLFDDKVMKQLKRRRYTGWGRLSRKLINGIRDKQSGKTILDFLKSDGFANRNFMQLIHDDSLTFKEDIQKAQVSGQGDSLHEHIANLAGSPAIKKGILQTVKVVDELVKVMGRHKPENIVIEMARENQTTQKGQKNSRERMKRIEEGIKELGSQILKEHPVENTQLQNEKLYLYYLQNGRDMYVDQELDINRLSDYDVDHIVPQSFLKDDSIDNKVLTRSDKNRGKSDNVPSEEVVKKMKNYWRQLLNAKLITQRKFDNLTKAERGGLSELDKAGFIKRQLVETRQITKHVAQILDSRMNTKYDENDKLIREVKVITLKSKLVSDFRKDFQFYKVREINNYHHAHDAYLNAVVGTALIKKYPKLESEFVYGDYKVYDVRKMIAKSEQEIGKATAKYFFYSNIMNFFKTEITLANGEIRKRPLIETNGETGEIVWDKGRDFATVRKVLSMPQVNIVKKTEVQTGGFSKESILPKRNSDKLIARKKDWDPKKYGGFVSPTVAYSVLVVAKVEKGKSKKLKSVKELLGITIMERSSFEKNPIDFLEAKGYKEVKKDLIIKLPKYSLFELENGRKRMLASARELQKGNELALPSKYVNFLYLASHYEKLKGSPEDNEQKQLFVEQHKHYLDEIIEQISEFSKRVILADANLDKVLSAYNKHRDKPIREQAENIIHLFTLTNLGAPAAFKYFDTTIDRKQYRSTKEVLDATLIHQSITGLYETRIDLSQLGGDEGADKRTADGSEFESPKKKRKV

SEQ ID NO: 347 - protein, 1588 aa, synthetic construct
  REGION 1..1588: note = 07. monoABE8.1_bpNLS + Q154R polypeptide sequence
MSEVEFSHEYWMRHALTLAKRARDEREVPVGAVLVLNNRVIGEGWNRAIGLHDPTAHAEIMALRQGGLVMQNYRLIDATLYVTFEPCVMCAGAMIHSRIGRVVFGVRNAKTGAAGSLMDVLHYPGMNHRVEITEGILADECAALLCYFFRMPRRVFNAQKKAQSSTDSGGSSGGSSGSETPGTSESATPESSGGSSGGSDKKYSIGLAIGTNSVGWAVITDEYKVPSKKFKVLGNTDRHSIKKNLIGALLFDSGETAEATRLKRTARRRYTRRKNRICYLQEIFSNEMAKVDDSFFHRLEESFLVEEDKKHERHPIFGNIVDEVAYHEKYPTIYHLRKKLVDSTDKADLRLIYLALAHMIKFRGHFLIEGDLNPDNSDVDKLFIQLVQTYNQLFEENPINASGVDAKAILSARLSKSRRLENLIAQLPGEKKNGLFGNLIALSLGLTPNFKSNFDLAEDAKLQLSKDTYDDDLDNLLAQIGDQYADLFLAAKNLSDAILLSDILRVNTEITKAPLSASMIKRYDEHHQDLTLLKALVRQQLPEKYKEIFFDQSKNGYAGYIDGGASQEEFYKFIKPILEKMDGTEELLVKLNREDLLRKQRTFDNGSIPHQIHLGELHAILRRQEDFYPFLKDNREKIEKILTFRIPYYVGPLARGNSRFAWMTRKSEETITPWNFEEVVDKGASAQSFIERMTNFDKNLPNEKVLPKHSLLYEYFTVYNELTKVKYVTEGMRKPAFLSGEQKKAIVDLLFKTNRKVTVKQLKEDYFKKIECFDSVEISGVEDRFNASLGTYHDLLKIIKDKDFLDNEENEDILEDIVLTLTLFEDREMIEERLKTYAHLFDDKVMKQLKRRRYTGWGRLSRKLINGIRDKQSGKTILDFLKSDGFANRNFMQLIHDDSLTFKEDIQKAQVSGQGDSLHEHIANLAGSPAIKKGILQTVKVVDELVKVMGRHKPENIVIEMARENQTTQKGQKNSRERMKRIEEGIKELGSQILKEHPVENTQLQNEKLYLYYLQNGRDMYVDQELDINRLSDYDVDHIVPQSFLKDDSIDNKVLTRSDKNRGKSDNVPSEEVVKKMKNYWRQLLNAKLITQRKFDNLTKAERGGLSELDKAGFIKRQLVETRQITKHVAQILDSRMNTKYDENDKLIREVKVITLKSKLVSDFRKDFQFYKVREINNYHHAHDAYLNAVVGTALIKKYPKLESEFVYGDYKVYDVRKMIAKSEQEIGKATAKYFFYSNIMNFFKTEITLANGEIRKRPLIETNGETGEIVWDKGRDFATVRKVLSMPQVNIVKKTEVQTGGFSKESILPKRNSDKLIARKKDWDPKKYGGFVSPTVAYSVLVVAKVEKGKSKKLKSVKELLGITIMERSSFEKNPIDFLEAKGYKEVKKDLIIKLPKYSLFELENGRKRMLASARELQKGNELALPSKYVNFLYLASHYEKLKGSPEDNEQKQLFVEQHKHYLDEIIEQISEFSKRVILADANLDKVLSAYNKHRDKPIREQAENIIHLFTLTNLGAPAAFKYFDTTIDRKQYRSTKEVLDATLIHQSITGLYETRIDLSQLGGDEGADKRTADGSEFESPKKKRKV

SEQ ID NO: 348 - protein, 1588 aa, synthetic construct
  REGION 1..1588: note = 08. monoABE8.1_bpNLS +Y147R_Q154R_Y123H polypeptide sequence
MSEVEFSHEYWMRHALTLAKRARDEREVPVGAVLVLNNRVIGEGWNRAIGLHDPTAHAEIMALRQGGLVMQNYRLIDATLYVTFEPCVMCAGAMIHSRIGRVVFGVRNAKTGAAGSLMDVLHHPGMNHRVEITEGILADECAALLCRFFRMPRRVFNAQKKAQSSTDSGGSSGGSSGSETPGTSESATPESSGGSSGGSDKKYSIGLAIGTNSVGWAVITDEYKVPSKKFKVLGNTDRHSIKKNLIGALLFDSGETAEATRLKRTARRRYTRRKNRICYLQEIFSNEMAKVDDSFFHRLEESFLVEEDKKHERHPIFGNIVDEVAYHEKYPTIYHLRKKLVDSTDKADLRLIYLALAHMIKFRGHFLIEGDLNPDNSDVDKLFIQLVQTYNQLFEENPINASGVDAKAILSARLSKSRRLENLIAQLPGEKKNGLFGNLIALSLGLTPNFKSNFDLAEDAKLQLSKDTYDDDLDNLLAQIGDQYADLFLAAKNLSDAILLSDILRVNTEITKAPLSASMIKRYDEHHQDLTLLKALVRQQLPEKYKEIFFDQSKNGYAGYIDGGASQEEFYKFIKPILEKMDGTEELLVKLNREDLLRKQRTFDNGSIPHQIHLGELHAILRRQEDFYPFLKDNREKIEKILTFRIPYYVGPLARGNSRFAWMTRKSEETITPWNFEEVVDKGASAQSFIERMTNFDKNLPNEKVLPKHSLLYEYFTVYNELTKVKYVTEGMRKPAFLSGEQKKAIVDLLFKTNRKVTVKQLKEDYFKKIECFDSVEISGVEDRFNASLGTYHDLLKIIKDKDFLDNEENEDILEDIVLTLTLFEDREMIEERLKTYAHLFDDKVMKQLKRRRYTGWGRLSRKLINGIRDKQSGKTILDFLKSDGFANRNFMQLIHDDSLTFKEDIQKAQVSGQGDSLHEHIANLAGSPAIKKGILQTVKVVDELVKVMGRHKPENIVIEMARENQTTQKGQKNSRERMKRIEEGIKELGSQILKEHPVENTQLQNEKLYLYYLQNGRDMYVDQELDINRLSDYDVDHIVPQSFLKDDSIDNKVLTRSDKNRGKSDNVPSEEVVKKMKNYWRQLLNAKLITQRKFDNLTKAERGGLSELDKAGFIKRQLVETRQITKHVAQILDSRMNTKYDENDKLIREVKVITLKSKLVSDFRKDFQFYKVREINNYHHAHDAYLNAVVGTALIKKYPKLESEFVYGDYKVYDVRKMIAKSEQEIGKATAKYFFYSNIMNFFKTEITLANGEIRKRPLIETNGETGEIVWDKGRDFATVRKVLSMPQVNIVKKTEVQTGGFSKESILPKRNSDKLIARKKDWDPKKYGGFVSPTVAYSVLVVAKVEKGKSKKLKSVKELLGITIMERSSFEKNPIDFLEAKGYKEVKKDLIIKLPKYSLFELENGRKRMLASARELQKGNELALPSKYVNFLYLASHYEKLKGSPEDNEQKQLFVEQHKHYLDEIIEQISEFSKRVILADANLDKVLSAYNKHRDKPIREQAENIIHLFTLTNLGAPAAFKYFDTTIDRKQYRSTKEVLDATLIHQSITGLYETRIDLSQLGGDEGADKRTADGSEFESPKKKRKV

SEQ ID NO: 349 - protein, 1588 aa, synthetic construct
  REGION 1..1588: note = 09. monoABE8.1_bpNLS +Y147R_Q154R_I76Y polypeptide sequence
MSEVEFSHEYWMRHALTLAKRARDEREVPVGAVLVLNNRVIGEGWNRAIGLHDPTAHAEIMALRQGGLVMQNYRLYDATLYVTFEPCVMCAGAMIHSRIGRVVFGVRNAKTGAAGSLMDVLHYPGMNHRVEITEGILADECAALLCRFFRMPRRVFNAQKKAQSSTDSGGSSGGSSGSETPGTSESATPESSGGSSGGSDKKYSIGLAIGTNSVGWAVITDEYKVPSKKFKVLGNTDRHSIKKNLIGALLFDSGETAEATRLKRTARRRYTRRKNRICYLQEIFSNEMAKVDDSFFHRLEESFLVEEDKKHERHPIFGNIVDEVAYHEKYPTIYHLRKKLVDSTDKADLRLIYLALAHMIKFRGHFLIEGDLNPDNSDVDKLFIQLVQTYNQLFEENPINASGVDAKAILSARLSKSRRLENLIAQLPGEKKNGLFGNLIALSLGLTPNFKSNFDLAEDAKLQLSKDTYDDDLDNLLAQIGDQYADLFLAAKNLSDAILLSDILRVNTEITKAPLSASMIKRYDEHHQDLTLLKALVRQQLPEKYKEIFFDQSKNGYAGYIDGGASQEEFYKFIKPILEKMDGTEELLVKLNREDLLRKQRTFDNGSIPHQIHLGELHAILRRQEDFYPFLKDNREKIEKILTFRIPYYVGPLARGNSRFAWMTRKSEETITPWNFEEVVDKGASAQSFIERMTNFDKNLPNEKVLPKHSLLYEYFTVYNELTKVKYVTEGMRKPAFLSGEQKKAIVDLLFKTNRKVTVKQLKEDYFKKIECFDSVEISGVEDRFNASLGTYHDLLKIIKDKDFLDNEENEDILEDIVLTLTLFEDREMIEERLKTYAHLFDDKVMKQLKRRRYTGWGRLSRKLINGIRDKQSGKTILDFLKSDGFANRNFMQLIHDDSLTFKEDIQKAQVSGQGDSLHEHIANLAGSPAIKKGILQTVKVVDELVKVMGRHKPENIVIEMARENQTTQKGQKNSRERMKRIEEGIKELGSQILKEHPVENTQLQNEKLYLYYLQNGRDMYVDQELDINRLSDYDVDHIVPQSFLKDDSIDNKVLTRSDKNRGKSDNVPSEEVVKKMKNYWRQLLNAKLITQRKFDNLTKAERGGLSELDKAGFIKRQLVETRQITKHVAQILDSRMNTKYDENDKLIREVKVITLKSKLVSDFRKDFQFYKVREINNYHHAHDAYLNAVVGTALIKKYPKLESEFVYGDYKVYDVRKMIAKSEQEIGKATAKYFFYSNIMNFFKTEITLANGEIRKRPLIETNGETGEIVWDKGRDFATVRKVLSMPQVNIVKKTEVQTGGFSKESILPKRNSDKLIARKKDWDPKKYGGFVSPTVAYSVLVVAKVEKGKSKKLKSVKELLGITIMERSSFEKNPIDFLEAKGYKEVKKDLIIKLPKYSLFELENGRKRMLASARELQKGNELALPSKYVNFLYLASHYEKLKGSPEDNEQKQLFVEQHKHYLDEIIEQISEFSKRVILADANLDKVLSAYNKHRDKPIREQAENIIHLFTLTNLGAPAAFKYFDTTIDRKQYRSTKEVLDATLIHQSITGLYETRIDLSQLGGDEGADKRTADGSEFESPKKKRKV

SEQ ID NO: 350 - protein, 1588 aa, synthetic construct
  REGION 1..1588: note = 10. monoABE8.1_bpNLS +Y147R_Q154R_T166R polypeptide sequence
MSEVEFSHEYWMRHALTLAKRARDEREVPVGAVLVLNNRVIGEGWNRAIGLHDPTAHAEIMALRQGGLVMQNYRLIDATLYVTFEPCVMCAGAMIHSRIGRVVFGVRNAKTGAAGSLMDVLHYPGMNHRVEITEGILADECAALLCRFFRMPRRVFNAQKKAQSSRDSGGSSGGSSGSETPGTSESATPESSGGSSGGSDKKYSIGLAIGTNSVGWAVITDEYKVPSKKFKVLGNTDRHSIKKNLIGALLFDSGETAEATRLKRTARRRYTRRKNRICYLQEIFSNEMAKVDDSFFHRLEESFLVEEDKKHERHPIFGNIVDEVAYHEKYPTIYHLRKKLVDSTDKADLRLIYLALAHMIKFRGHFLIEGDLNPDNSDVDKLFIQLVQTYNQLFEENPINASGVDAKAILSARLSKSRRLENLIAQLPGEKKNGLFGNLIALSLGLTPNFKSNFDLAEDAKLQLSKDTYDDDLDNLLAQIGDQYADLFLAAKNLSDAILLSDILRVNTEITKAPLSASMIKRYDEHHQDLTLLKALVRQQLPEKYKEIFFDQSKNGYAGYIDGGASQEEFYKFIKPILEKMDGTEELLVKLNREDLLRKQRTFDNGSIPHQIHLGELHAILRRQEDFYPFLKDNREKIEKILTFRIPYYVGPLARGNSRFAWMTRKSEETITPWNFEEVVDKGASAQSFIERMTNFDKNLPNEKVLPKHSLLYEYFTVYNELTKVKYVTEGMRKPAFLSGEQKKAIVDLLFKTNRKVTVKQLKEDYFKKIECFDSVEISGVEDRFNASLGTYHDLLKIIKDKDFLDNEENEDILEDIVLTLTLFEDREMIEERLKTYAHLFDDKVMKQLKRRRYTGWGRLSRKLINGIRDKQSGKTILDFLKSDGFANRNFMQLIHDDSLTFKEDIQKAQVSGQGDSLHEHIANLAGSPAIKKGILQTVKVVDELVKVMGRHKPENIVIEMARENQTTQKGQKNSRERMKRIEEGIKELGSQILKEHPVENTQLQNEKLYLYYLQNGRDMYVDQELDINRLSDYDVDHIVPQSFLKDDSIDNKVLTRSDKNRGKSDNVPSEEVVKKMKNYWRQLLNAKLITQRKFDNLTKAERGGLSELDKAGFIKRQLVETRQITKHVAQILDSRMNTKYDENDKLIREVKVITLKSKLVSDFRKDFQFYKVREINNYHHAHDAYLNAVVGTALIKKYPKLESEFVYGDYKVYDVRKMIAKSEQEIGKATAKYFFYSNIMNFFKTEITLANGEIRKRPLIETNGETGEIVWDKGRDFATVRKVLSMPQVNIVKKTEVQTGGFSKESILPKRNSDKLIARKKDWDPKKYGGFVSPTVAYSVLVVAKVEKGKSKKLKSVKELLGITIMERSSFEKNPIDFLEAKGYKEVKKDLIIKLPKYSLFELENGRKRMLASARELQKGNELALPSKYVNFLYLASHYEKLKGSPEDNEQKQLFVEQHKHYLDEIIEQISEFSKRVILADANLDKVLSAYNKHRDKPIREQAENIIHLFTLTNLGAPAAFKYFDTTIDRKQYRSTKEVLDATLIHQSITGLYETRIDLSQLGGDEGADKRTADGSEFESPKKKRKV

SEQ ID NO: 351 - protein, 1588 aa, synthetic construct
  REGION 1..1588: note = 11. monoABE8.1_bpNLS +Y147T_Q154R polypeptide sequence
MSEVEFSHEYWMRHALTLAKRARDEREVPVGAVLVLNNRVIGEGWNRAIGLHDPTAHAEIMALRQGGLVMQNYRLIDATLYVTFEPCVMCAGAMIHSRIGRVVFGVRNAKTGAAGSLMDVLHYPGMNHRVEITEGILADECAALLCTFFRMPRRVFNAQKKAQSSTDSGGSSGGSSGSETPGTSESATPESSGGSSGGSDKKYSIGLAIGTNSVGWAVITDEYKVPSKKFKVLGNTDRHSIKKNLIGALLFDSGETAEATRLKRTARRRYTRRKNRICYLQEIFSNEMAKVDDSFFHRLEESFLVEEDKKHERHPIFGNIVDEVAYHEKYPTIYHLRKKLVDSTDKADLRLIYLALAHMIKFRGHFLIEGDLNPDNSDVDKLFIQLVQTYNQLFEENPINASGVDAKAILSARLSKSRRLENLIAQLPGEKKNGLFGNLIALSLGLTPNFKSNFDLAEDAKLQLSKDTYDDDLDNLLAQIGDQYADLFLAAKNLSDAILLSDILRVNTEITKAPLSASMIKRYDEHHQDLTLLKALVRQQLPEKYKEIFFDQSKNGYAGYIDGGASQEEFYKFIKPILEKMDGTEELLVKLNREDLLRKQRTFDNGSIPHQIHLGELHAILRRQEDFYPFLKDNREKIEKILTFRIPYYVGPLARGNSRFAWMTRKSEETITPWNFEEVVDKGASAQSFIERMTNFDKNLPNEKVLPKHSLLYEYFTVYNELTKVKYVTEGMRKPAFLSGEQKKAIVDLLFKTNRKVTVKQLKEDYFKKIECFDSVEISGVEDRFNASLGTYHDLLKIIKDKDFLDNEENEDILEDIVLTLTLFEDREMIEERLKTYAHLFDDKVMKQLKRRRYTGWGRLSRKLINGIRDKQSGKTILDFLKSDGFANRNFMQLIHDDSLTFKEDIQKAQVSGQGDSLHEHIANLAGSPAIKKGILQTVKVVDELVKVMGRHKPENIVIEMARENQTTQKGQKNSRERMKRIEEGIKELGSQILKEHPVENTQLQNEKLYLYYLQNGRDMYVDQELDINRLSDYDVDHIVPQSFLKDDSIDNKVLTRSDKNRGKSDNVPSEEVVKKMKNYWRQLLNAKLITQRKFDNLTKAERGGLSELDKAGFIKRQLVETRQITKHVAQILDSRMNTKYDENDKLIREVKVITLKSKLVSDFRKDFQFYKVREINNYHHAHDAYLNAVVGTALIKKYPKLESEFVYGDYKVYDVRKMIAKSEQEIGKATAKYFFYSNIMNFFKTEITLANGEIRKRPLIETNGETGEIVWDKGRDFATVRKVLSMPQVNIVKKTEVQTGGFSKESILPKRNSDKLIARKKDWDPKKYGGFVSPTVAYSVLVVAKVEKGKSKKLKSVKELLGITIMERSSFEKNPIDFLEAKGYKEVKKDLIIKLPKYSLFELENGRKRMLASARELQKGNELALPSKYVNFLYLASHYEKLKGSPEDNEQKQLFVEQHKHYLDEIIEQISEFSKRVILADANLDKVLSAYNKHRDKPIREQAENIIHLFTLTNLGAPAAFKYFDTTIDRKQYRSTKEVLDATLIHQSITGLYETRIDLSQLGGDEGADKRTADGSEFESPKKKRKV

SEQ ID NO: 352 - protein, 1588 aa, synthetic construct
  REGION 1..1588: note = 12. monoABE8.1_bpNLS +Y147T_Q154S polypeptide sequence
MSEVEFSHEYWMRHALTLAKRARDEREVPVGAVLVLNNRVIGEGWNRAIGLHDPTAHAEIMALRQGGLVMQNYRLIDATLYVTFEPCVMCAGAMIHSRIGRVVFGVRNAKTGAAGSLMDVLHYPGMNHRVEITEGILADECAALLCTFFRMPRSVFNAQKKAQSSTDSGGSSGGSSGSETPGTSESATPESSGGSSGGSDKKYSIGLAIGTNSVGWAVITDEYKVPSKKFKVLGNTDRHSIKKNLIGALLFDSGETAEATRLKRTARRRYTRRKNRICYLQEIFSNEMAKVDDSFFHRLEESFLVEEDKKHERHPIFGNIVDEVAYHEKYPTIYHLRKKLVDSTDKADLRLIYLALAHMIKFRGHFLIEGDLNPDNSDVDKLFIQLVQTYNQLFEENPINASGVDAKAILSARLSKSRRLENLIAQLPGEKKNGLFGNLIALSLGLTPNFKSNFDLAEDAKLQLSKDTYDDDLDNLLAQIGDQYADLFLAAKNLSDAILLSDILRVNTEITKAPLSASMIKRYDEHHQDLTLLKALVRQQLPEKYKEIFFDQSKNGYAGYIDGGASQEEFYKFIKPILEKMDGTEELLVKLNREDLLRKQRTFDNGSIPHQIHLGELHAILRRQEDFYPFLKDNREKIEKILTFRIPYYVGPLARGNSRFAWMTRKSEETITPWNFEEVVDKGASAQSFIERMTNFDKNLPNEKVLPKHSLLYEYFTVYNELTKVKYVTEGMRKPAFLSGEQKKAIVDLLFKTNRKVTVKQLKEDYFKKIECFDSVEISGVEDRFNASLGTYHDLLKIIKDKDFLDNEENEDILEDIVLTLTLFEDREMIEERLKTYAHLFDDKVMKQLKRRRYTGWGRLSRKLINGIRDKQSGKTILDFLKSDGFANRNFMQLIHDDSLTFKEDIQKAQVSGQGDSLHEHIANLAGSPAIKKGILQTVKVVDELVKVMGRHKPENIVIEMARENQTTQKGQKNSRERMKRIEEGIKELGSQILKEHPVENTQLQNEKLYLYYLQNGRDMYVDQELDINRLSDYDVDHIVPQSFLKDDSIDNKVLTRSDKNRGKSDNVPSEEVVKKMKNYWRQLLNAKLITQRKFDNLTKAERGGLSELDKAGFIKRQLVETRQITKHVAQILDSRMNTKYDENDKLIREVKVITLKSKLVSDFRKDFQFYKVREINNYHHAHDAYLNAVVGTALIKKYPKLESEFVYGDYKVYDVRKMIAKSEQEIGKATAKYFFYSNIMNFFKTEITLANGEIRKRPLIETNGETGEIVWDKGRDFATVRKVLSMPQVNIVKKTEVQTGGFSKESILPKRNSDKLIARKKDWDPKKYGGFVSPTVAYSVLVVAKVEKGKSKKLKSVKELLGITIMERSSFEKNPIDFLEAKGYKEVKKDLIIKLPKYSLFELENGRKRMLASARELQKGNELALPSKYVNFLYLASHYEKLKGSPEDNEQKQLFVEQHKHYLDEIIEQISEFSKRVILADANLDKVLSAYNKHRDKPIREQAENIIHLFTLTNLGAPAAFKYFDTTIDRKQYRSTKEVLDATLIHQSITGLYETRIDLSQLGGDEGADKRTADGSEFESPKKKRKV

SEQ ID NO: 353 - protein, 1588 aa, synthetic construct
  REGION 1..1588: note = 13. monoABE8.1_bpNLS +H123Y123H_Y147R_Q154R_I76Y polypeptide sequence
MSEVEFSHEYWMRHALTLAKRARDEREVPVGAVLVLNNRVIGEGWNRAIGLHDPTAHAEIMALRQGGLVMQNYRLYDATLYVTFEPCVMCAGAMIHSRIGRVVFGVRNAKTGAAGSLMDVLHHPGMNHRVEITEGILADECAALLCRFFRMPRRVFNAQKKAQSSTDSGGSSGGSSGSETPGTSESATPESSGGSSGGSDKKYSIGLAIGTNSVGWAVITDEYKVPSKKFKVLGNTDRHSIKKNLIGALLFDSGETAEATRLKRTARRRYTRRKNRICYLQEIFSNEMAKVDDSFFHRLEESFLVEEDKKHERHPIFGNIVDEVAYHEKYPTIYHLRKKLVDSTDKADLRLIYLALAHMIKFRGHFLIEGDLNPDNSDVDKLFIQLVQTYNQLFEENPINASGVDAKAILSARLSKSRRLENLIAQLPGEKKNGLFGNLIALSLGLTPNFKSNFDLAEDAKLQLSKDTYDDDLDNLLAQIGDQYADLFLAAKNLSDAILLSDILRVNTEITKAPLSASMIKRYDEHHQDLTLLKALVRQQLPEKYKEIFFDQSKNGYAGYIDGGASQEEFYKFIKPILEKMDGTEELLVKLNREDLLRKQRTFDNGSIPHQIHLGELHAILRRQEDFYPFLKDNREKIEKILTFRIPYYVGPLARGNSRFAWMTRKSEETITPWNFEEVVDKGASAQSFIERMTNFDKNLPNEKVLPKHSLLYEYFTVYNELTKVKYVTEGMRKPAFLSGEQKKAIVDLLFKTNRKVTVKQLKEDYFKKIECFDSVEISGVEDRFNASLGTYHDLLKIIKDKDFLDNEENEDILEDIVLTLTLFEDREMIEERLKTYAHLFDDKVMKQLKRRRYTGWGRLSRKLINGIRDKQSGKTILDFLKSDGFANRNFMQLIHDDSLTFKEDIQKAQVSGQGDSLHEHIANLAGSPAIKKGILQTVKVVDELVKVMGRHKPENIVIEMARENQTTQKGQKNSRERMKRIEEGIKELGSQILKEHPVENTQLQNEKLYLYYLQNGRDMYVDQELDINRLSDYDVDHIVPQSFLKDDSIDNKVLTRSDKNRGKSDNVPSEEVVKKMKNYWRQLLNAKLITQRKFDNLTKAERGGLSELDKAGFIKRQLVETRQITKHVAQILDSRMNTKYDENDKLIREVKVITLKSKLVSDFRKDFQFYKVREINNYHHAHDAYLNAVVGTALIKKYPKLESEFVYGDYKVYDVRKMIAKSEQEIGKATAKYFFYSNIMNFFKTEITLANGEIRKRPLIETNGETGEIVWDKGRDFATVRKVLSMPQVNIVKKTEVQTGGFSKESILPKRNSDKLIARKKDWDPKKYGGFVSPTVAYSVLVVAKVEKGKSKKLKSVKELLGITIMERSSFEKNPIDFLEAKGYKEVKKDLIIKLPKYSLFELENGRKRMLASARELQKGNELALPSKYVNFLYLASHYEKLKGSPEDNEQKQLFVEQHKHYLDEIIEQISEFSKRVILADANLDKVLSAYNKHRDKPIREQAENIIHLFTLTNLGAPAAFKYFDTTIDRKQYRSTKEVLDATLIHQSITGLYETRIDLSQLGGDEGADKRTADGSEFESPKKKRKV

SEQ ID NO: 354 - protein, 1588 aa, synthetic construct
  REGION 1..1588: note = 14. monoABE8.1_bpNLS + V82S +Q154R polypeptide sequence
MSEVEFSHEYWMRHALTLAKRARDEREVPVGAVLVLNNRVIGEGWNRAIGLHDPTAHAEIMALRQGGLVMQNYRLIDATLYSTFEPCVMCAGAMIHSRIGRVVFGVRNAKTGAAGSLMDVLHYPGMNHRVEITEGILADECAALLCYFFRMPRRVFNAQKKAQSSTDSGGSSGGSSGSETPGTSESATPESSGGSSGGSDKKYSIGLAIGTNSVGWAVITDEYKVPSKKFKVLGNTDRHSIKKNLIGALLFDSGETAEATRLKRTARRRYTRRKNRICYLQEIFSNEMAKVDDSFFHRLEESFLVEEDKKHERHPIFGNIVDEVAYHEKYPTIYHLRKKLVDSTDKADLRLIYLALAHMIKFRGHFLIEGDLNPDNSDVDKLFIQLVQTYNQLFEENPINASGVDAKAILSARLSKSRRLENLIAQLPGEKKNGLFGNLIALSLGLTPNFKSNFDLAEDAKLQLSKDTYDDDLDNLLAQIGDQYADLFLAAKNLSDAILLSDILRVNTEITKAPLSASMIKRYDEHHQDLTLLKALVRQQLPEKYKEIFFDQSKNGYAGYIDGGASQEEFYKFIKPILEKMDGTEELLVKLNREDLLRKQRTFDNGSIPHQIHLGELHAILRRQEDFYPFLKDNREKIEKILTFRIPYYVGPLARGNSRFAWMTRKSEETITPWNFEEVVDKGASAQSFIERMTNFDKNLPNEKVLPKHSLLYEYFTVYNELTKVKYVTEGMRKPAFLSGEQKKAIVDLLFKTNRKVTVKQLKEDYFKKIECFDSVEISGVEDRFNASLGTYHDLLKIIKDKDFLDNEENEDILEDIVLTLTLFEDREMIEERLKTYAHLFDDKVMKQLKRRRYTGWGRLSRKLINGIRDKQSGKTILDFLKSDGFANRNFMQLIHDDSLTFKEDIQKAQVSGQGDSLHEHIANLAGSPAIKKGILQTVKVVDELVKVMGRHKPENIVIEMARENQTTQKGQKNSRERMKRIEEGIKELGSQILKEHPVENTQLQNEKLYLYYLQNGRDMYVDQELDINRLSDYDVDHIVPQSFLKDDSIDNKVLTRSDKNRGKSDNVPSEEVVKKMKNYWRQLLNAKLITQRKFDNLTKAERGGLSELDKAGFIKRQLVETRQITKHVAQILDSRMNTKYDENDKLIREVKVITLKSKLVSDFRKDFQFYKVREINNYHHAHDAYLNAVVGTALIKKYPKLESEFVYGDYKVYDVRKMIAKSEQEIGKATAKYFFYSNIMNFFKTEITLANGEIRKRPLIETNGETGEIVWDKGRDFATVRKVLSMPQVNIVKKTEVQTGGFSKESILPKRNSDKLIARKKDWDPKKYGGFVSPTVAYSVLVVAKVEKGKSKKLKSVKELLGITIMERSSFEKNPIDFLEAKGYKEVKKDLIIKLPKYSLFELENGRKRMLASARELQKGNELALPSKYVNFLYLASHYEKLKGSPEDNEQKQLFVEQHKHYLDEIIEQISEFSKRVILADANLDKVLSAYNKHRDKPIREQAENIIHLFTLTNLGAPAAFKYFDTTIDRKQYRSTKEVLDATLIHQSITGLYETRIDLSQLGGDEGADKRTADGSEFESPKKKRKV

SEQ ID NO: 355 - protein, 4 aa, synthetic construct
  REGION 1..4: note = synthetic peptide sequence
SGGS

SEQ ID NO: 356 - protein, 24 aa, synthetic construct
  REGION 1..24: note = synthetic peptide sequence
SGGSSGSETPGTSESATPESSGGS

SEQ ID NO: 357 - protein, 32 aa, synthetic construct
  REGION 1..32: note = synthetic polypeptide sequence
SGGSSGGSSGSETPGTSESATPESSGGSSGGS

SEQ ID NO: 358 - protein, 104 aa, synthetic construct
  REGION 1..104: note = synthetic polypeptide sequence
GGSGGSPGSPAGSPTSTEEGTSESATPESGPGTSTEPSEGSAPGSPAGSPTSTEEGTSTEPSEGSAPGTSTEPSEGSAPGTSESATPESGPGSEPATSGGSGGS

SEQ ID NO: 359 - protein, 24 aa, synthetic construct
  REGION 1..24: note = synthetic peptide sequence
SGGSSGGSSGSETPGTSESATPES

SEQ ID NO: 360 - protein, 40 aa, synthetic construct
  REGION 1..40: note = synthetic polypeptide sequence
SGGSSGGSSGSETPGTSESATPESSGGSSGGSSGGSSGGS

SEQ ID NO: 361 - protein, 64 aa, synthetic construct
  REGION 1..64: note = synthetic polypeptide sequence
SGGSSGGSSGSETPGTSESATPESSGGSSGGSSGGSSGGSSGSETPGTSESATPESSGGSSGGS

SEQ ID NO: 362 - protein, 92 aa, synthetic construct
  REGION 1..92: note = synthetic polypeptide sequence
PGSPAGSPTSTEEGTSESATPESGPGTSTEPSEGSAPGSPAGSPTSTEEGTSTEPSEGSAPGTSTEPSEGSAPGTSESATPESGPGSEPATS

SEQ ID NO: 363 - protein, 5 aa, synthetic construct
  REGION 1..5: note = synthetic peptide sequence
PAPAP

SEQ ID NO: 364 - protein, 6 aa, synthetic construct
  REGION 1..6: note = synthetic peptide sequence
PAPAPA

SEQ ID NO: 365 - protein, 7 aa, synthetic construct
  REGION 1..7: note = synthetic peptide sequence
PAPAPAP

SEQ ID NO: 366 - protein, 8 aa, synthetic construct
  REGION 1..8: note = synthetic peptide sequence
PAPAPAPA

SEQ ID NO: 367 - protein, 9 aa, synthetic construct
  REGION 1..9: note = synthetic peptide sequence
PAPAPAPAP

SEQ ID NO: 368 - protein, 15 aa, synthetic construct
  REGION 1..15: note = synthetic peptide sequence
PAPAPAPAPAPAPAP

SEQ ID NO: 369 - protein, 21 aa, synthetic construct
  REGION 1..21: note = synthetic peptide sequence
PAPAPAPAPAPAPAPAPAPAP

SEQ ID NO: 370 - DNA, 306 bp, synthetic construct
  misc_feature 1..306: note = DnaE Intein-N polynucleotide sequence
  source 1..306: mol_type = other DNA
tgcctgtcatacgaaaccgagatactgacagtagaatatggccttctgccaatcgggaagattgtggagaaacggatagaatgcacagtttactctgtcgataacaatggtaacatttatactcagccagttgcccagtggcacgaccggggagagcaggaagtattcgaatactgtctggaggatggaagtctcattagggccactaaggaccacaaatttatgacagtcgatggccagatgctgcctatagacgaaatctttgagcgagagttggacctcatgcgagttgacaaccttcctaat

SEQ ID NO: 371 - protein, 102 aa, synthetic construct
  REGION 1..102: note = DnaE Intein-N polypeptide sequence
CLSYETEILTVEYGLLPIGKIVEKRIECTVYSVDNNGNIYTQPVAQWHDRGEQEVFEYCLEDGSLIRATKDHKFMTVDGQMLPIDEIFERELDLMRVDNLPN

SEQ ID NO: 372 - DNA, 108 bp, synthetic construct
  misc_feature 1..108: note = DnaE Intein-C polynucleotide sequence
  source 1..108: mol_type = other DNA
atgatcaagatagctacaaggaagtatcttggcaaacaaaacgtttatgatattggagtcgaaagagatcacaactttgctctgaagaacggattcatagcttctaat

SEQ ID NO: 373 - protein, 36 aa, synthetic construct
  REGION 1..36: note = DnaE Intein-C polypeptide sequence
MIKIATRKYLGKQNVYDIGVERDHNFALKNGFIASN

SEQ ID NO: 374 - DNA, 303 bp, synthetic construct
  misc_feature 1..303: note = Cfa-N polynucleotide sequence
  source 1..303: mol_type = other DNA
tgcctgtcttatgataccgagatacttaccgttgaatatggcttcttgcctattggaaagattgtcgaagagagaattgaatgcacagtatatactgtagacaagaatggtttcgtttacacacagcccattgctcaatggcacaatcgcggcgaacaagaagtatttgagtactgtctcgaggatggaagcatcatacgagcaactaaagatcataaattcatgaccactgacgggcagatgttgccaatagatgagatattcgagcggggcttggatctcaaacaagtggatggattgcca

SEQ ID NO: 375 - protein, 101 aa, synthetic construct
  REGION 1..101: note = Cfa-N polypeptide sequence
CLSYDTEILTVEYGFLPIGKIVEERIECTVYTVDKNGFVYTQPIAQWHNRGEQEVFEYCLEDGSIIRATKDHKFMTTDGQMLPIDEIFERGLDLKQVDGLP

SEQ ID NO: 376 - DNA, 159 bp, synthetic construct
  misc_feature 1..159: note = Cfa-C polynucleotide sequence
  source 1..159: mol_type = other DNA
atgaagaggactgccgatggatcagagtttgaatctcccaagaagaagaggaaagtaaagataatatctcgaaaaagtcttggtacccaaaatgtctatgatattggagtggagaaagatcacaacttccttctcaagaacggtctcgtagccagcaac

SEQ ID NO: 377 - protein, 53 aa, synthetic construct
  REGION 1..53: note = Cfa-C polypeptide sequence
MKRTADGSEFESPKKKRKVKIISRKSLGTQNVYDIGVEKDHNFLLKNGLVASN

SEQ ID NO: 378 - protein, 1081 aa, Neisseria meningitidis
  REGION 1..1081: note = MISC_FEATURE - Nme3Cas9; WP_002217928.1 type II CRISPR RNA-guided endonuclease Cas9 [Neisseria meningitidis]
  REGION 1..1081: note = MISC_FEATURE - NCBI Reference: WP_002217928.1; type II CRISPR RNA-guided endonuclease Cas9; Nme3Cas9 polypeptide sequence
MAAFKPNPINYILGLDIGIASVGWAMVEIDEEENPIRLIDLGVRVFERAEVPKTGDSLAMARRLARSVRRLTRRRAHRLLRARRLLKREGVLQAADFDENGLIKSLPNTPWQLRAAALDRKLTPLEWSAVLLHLIKHRGYLSQRKNEGETADKELGALLKGVADNAHALQTGDFRTPAELALNKFEKECGHIRNQRGDYSHTFSRKDLQAELNLLFEKQKEFGNPHVSGGLKEGIETLLMTQRPALSGDAVQKMLGHCTFEPAEPKAAKNTYTAERFIWLTKLNNLRILEQGSERPLTDTERATLMDEPYRKSKLTYAQARKLLSLEDTAFFKGLRYGKDNAEASTLMEMKAYHTISRALEKEGLKDKKSPLNLSPELQDEIGTAFSLFKTDEDITGRLKDRIQPEILEALLKHISFDKFVQISLKALRRIVPLMEQGKRYDEACAEIYGDHYGKKNTEEKIYLPPIPADEIRNPVVLRALSQARKVINGVVRRYGSPARIHIETAREVGKSFKDRKEIEKRQEENRKDREKAAAKFREYFPNFVGEPKSKDILKLRLYEQQHGKCLYSGKEINLGRLNEKGYVEIDHALPFSRTWDDSFNNKVLVLGSENQNKGNQTPYEYFNGKDNSREWQEFKARVETSRFPRSKKQRILLQKFDEDGFKERNLNDTRYVNRFLCQFVADRMRLTGKGKKRVFASNGQITNLLRGFWGLRKVRAENDRHHALDAVVVACSTVAMQQKITRFVRYKEMNAFDGKTIDKETGEVLHQKTHFPQPWEFFAQEVMIRVFGKPDGKPEFEEADTPEKLRTLLAEKLSSRPEAVHEYVTPLFVSRAPNRKMSGQGHMETVKSAKRLDEGVSVLRVPLTQLKLKDLEKMVNREREPKLYEALKARLEAHKDDPAKAFAEPFYKYDKAGNRTQQVKAVRVEQVQKTGVWVRNHNGIADNATMVRVDVFEKGDKYYLVPIYSWQVAKGILPDRAVVAYADEEDWTVIDESFRFKFVLYSNDLIKVQLKKDSFLGYFSGLDRATGAISLREHDLEKSKGKDGMHRIGVKTALSFQKYQIDEMGKEIRPCRLKKRPPVR

SEQ ID NO: 379 - RNA, 66 nt, synthetic construct
  misc_feature 1..66: note = Telomerase Ku Binding Motif oligonucleotide sequence
  source 1..66: mol_type = other RNA
ttcttgtcgtacttatagatcgctacgttatttcaattttgaaaatctgagtcctgggagtgcgga

SEQ ID NO: 380 - protein, 1094 aa, synthetic construct
  REGION 1..1094: note = Telomerase Ku Heterodimer polypeptide sequence
MSGWESYYKTEGDEEAEEEQEENLEASGDYKYSGRDSLIFLVDASKAMFESQSEDELTPFDMSIQCIQSVYISKIISSDRDLLAVVFYGTEKDKNSVNFKNIYVLQELDNPGAKRILELDQFKGQQGQKRFQDMMGHGSDYSLSEVLWVCANLFSDVQFKMSHKRIMLFTNEDNPHGNDSAKASRARTKAGDLRDTGIFLDLMHLKKPGGFDISLFYRDIISIAEDEDLRVHFEESSKLEDLLRKVRAKETRKRALSRLKLKLNKDIVISVGIYNLVQKALKPPPIKLYRETNEPVKTKTRTFNTSTGGLLLPSDTKRSQIYGSRQIILEKEETEELKRFDDPGLMLMGFKPLVLLKKHHYLRPSLFVYPEESLVIGSSTLFSALLIKCLEKEVAALCRYTPRRNIPPYFVALVPQEEELDDQKIQVTPPGFQLVFLPFADDKRKMPFTEKIMATPEQVGKMKAIVEKLRFTYRSDSFENPVLQQHFRNLEALALDLMEPEQAVDLTLPKVEAMNKRLGSLVDEFKELVYPPDYNPEGKVTKRKHDNEGSGSKRPKVEYSEEELKTHISKGTLGKFTVPMLKEACRAYGLKSGLKKQELLEALTKHFQDMVRSGNKAAVVLCMDVGFTMSNSIPGIESPFEQAKKVITMFVQRQVFAENKDEIALVLFGTDGTDNPLSGGDQYQNITVHRHLMLPDFDLLEDIESKIQPGSQQADFLDALIVSMDVIQHETIGKKFEKRHIEIFTDLSSRFSKSQLDIIIHSLKKCDISERHSIHWPCRLTIGSNLSIRIAAYKSILQERVKKTWTVVDAKTLKKEDIQKETVYCLNDDDETEVLKEDIIQGFRYGSDIVPFSKVDEEQMKYKSEGKCFSVLGFCKSSQVQRRFFMGNQVLKVFAARDDEAAAVALSSLIHALDDLDMVAIVRYAYDKRANPQVGVAFPHIKHNYECLVYVQLPFMEDLRQYMFSSLKNSKKYAPTEAQLNAVDALIDSMSLAKKDEKTDTLEDLFPTTKIPNPRFQRLFQCLLHRALHPREPLPPIQQHIWNMLNPPAEVTTKSQIPLSKIKTLFPLIEAKKKDQVTAQEIFQDNHEDGPTAK

SEQ ID NO: 381 - RNA, 10 nt, synthetic construct
  misc_feature 1..10: note = Telomerase Sm7 consensus site(single stranded) oligonucleotide sequence
  source 1..10: mol_type = other RNA
aatttttgga

SEQ ID NO: 382 - protein, 83 aa, synthetic construct
  REGION 1..83: note = MS2 coat protein polypeptide sequence
GSVIDVSSQRVNVQRPLDALGNSLNSPVIIKLKGDREFRGVLKSFDLHMNLVLNDAEELEDGEVTRRLGTVLIRGDNIVYISP

SEQ ID NO: 383 - RNA, 26 nt, synthetic construct
  misc_feature 1..26: note = PP7 phage operator stem loop oligonucleotide sequence
  source 1..26: mol_type = other RNA
ataaggagtttatatggaaaccctta

SEQ ID NO: 384 - protein, 128 aa, synthetic construct
  REGION 1..128: note = PP7 coat protein (PCP)polypeptide sequence
MSKTIVLSVGEATRTLTEIQSTADRQIFEEKVGPLVGRLRLTASLRQNGAKTAYRVNLKLDQADVVDCSTSVCGELPKVRYTQVWSHDVTIVANSTEASRKSLYDLTKSLVATSQVEDLVVNLVPLGR

SEQ ID NO: 385 - RNA, 19 nt, synthetic construct
  misc_feature 1..19: note = SfMu Com stem loop oligonucleotide sequence
  source 1..19: mol_type = other RNA
ctgaatgcctgcgagcatc

SEQ ID NO: 386 - protein, 62 aa, synthetic construct
  REGION 1..62: note = SfMu Com binding protein polypeptide sequence
MKSIRCKNCNKLLFKADSFDHIEIRCPRCKRHIIMLNACEHPTEKHCGKREKITHSDETVRY

SEQ ID NO: 387 - protein, 47 aa, synthetic construct
  REGION 1..47: note = leucine zipper polypeptide sequence
LEIRAAFLRQRNTALRTEVAELEQEVQRLENEVSQYETRYGPLGGGK

SEQ ID NO: 388 - protein, 47 aa, synthetic construct
  REGION 1..47: note = leucine zipper polypeptide sequence
LEIEAAFLERENTALETRVAELRQRVQRLRNRVSQYRTRYGPLGGGK

SEQ ID NO: 389 - DNA, 303 bp, synthetic construct
  source 1..303: mol_type = other DNA
tgcctgagctacgataccgagatcctgaccgtggaatacggcttcctgcctatcggcaagatcgtcgaggaacggatcgagtgcacagtgtacaccgtggataagaatggcttcgtgtacacccagcctatcgctcagtggcacaacagaggcgagcaagaggtgttcgagtactgcctggaagatggcagcatcatccgggccaccaaggaccacaagtttatgaccaccgacggccagatgctgcccatcgacgagatctttgagagaggcctggacctgaaacaggtggacggactgcct

SEQ ID NO: 390 - protein, 101 aa, synthetic construct; identical to SEQ ID NO: 375

SEQ ID NO: 391 - DNA, 264 bp, synthetic construct
  source 1..264: mol_type = other DNA
tgtctggacctcaagacccaagtgcagacacctcagggcatgaaagagattagcaatatccaggtgggcgacctggtcctgagcaacaccggctacaacgaggtgctgaacgtgttccctaagtccaagaagaaatcttataagatcaccctggaagatggcaaggaaatcatctgcagcgaggaacacctgttccccacccagaccggcgagatgaacatcagcggcggactgaaggagggcatgtgcctgtacgtgaaggag

SEQ ID NO: 392 - protein, 88 aa, synthetic construct
CLDLKTQVQTPQGMKEISNIQVGDLVLSNTGYNEVLNVFPKSKKKSYKITLEDGKEIICSEEHLFPTQTGEMNISGGLKEGMCLYVKE

SEQ ID NO: 393 - DNA, 267 bp, synthetic construct
  source 1..267: mol_type = other DNA
tgcctgagcctggacaccatggtggtgacaaacggcaaggccatcgagatcagagatgtgaaggtgggagattggctggaaagcgaatgtggcccagtgcaggttacagaggtgctgcctatcatcaagcagcctgtctttgagattgtgctgaaaagcggaaaaaagatccgggtgtccgctaatcacaagttccccaccaaggacggcctcaagaccatcaacagcggcctgaaggtgggcgacttcctgagaagcagagccaag

SEQ ID NO: 394 - protein, 89 aa, synthetic construct
CLSLDTMVVTNGKAIEIRDVKVGDWLESECGPVQVTEVLPIIKQPVFEIVLKSGKKIRVSANHKFPTKDGLKTINSGLKVGDFLRSRAK

SEQ ID NO: 395 - DNA, 303 bp, synthetic construct
  source 1..303: mol_type = other DNA
tgttttgtgcctggcaccctggtgaacacagagaatggcctgaagaaaatcgaggaaatcaaggtgggcgacaaggtgttcagccatacaggcaagctgcaggaggtggtggacaccctgatcttcgaccgggacgaggaaatcatctctatcaacggcattgattgcaccaagaaccacgagttctacgtgatcgataaggaaaacgctaatagagtgaacgaggacaacatccacctcttcgccagatgggtccacgccgaggaactggatatgaaaaagcacctgctgatcgagctggaa

SEQ ID NO: 396 - protein, 101 aa, synthetic construct
CFVPGTLVNTENGLKKIEEIKVGDKVFSHTGKLQEVVDTLIFDRDEEIISINGIDCTKNHEFYVIDKENANRVNEDNIHLFARWVHAEELDMKKHLLIELE

SEQ ID NO: 397 - DNA, 315 bp, synthetic construct
  source 1..315: mol_type = other DNA
tgcctggtgggctctagcgagattatcacaagaaactacggcaagaccaccatcaaggaagtggtcgagatcttcgacaacgacaagaatatccaggtgctggccttcaacacccacaccgataatatcgagtgggcccctatcaaggccgctcagctgaccagacctaacgccgagctggttgaactggaaatcgacaccctgcacggcgtgaaaacaatccggtgcacccctgaccaccccgtgtacaccaagaacagaggctacgtgcgggccgacgagctgacagatgatgacgagctcgtggtggctatc

SEQ ID NO: 398 - protein, 105 aa, synthetic construct
CLVGSSEIITRNYGKTTIKEVVEIFDNDKNIQVLAFNTHTDNIEWAPIKAAQLTRPNAELVELEIDTLHGVKTIRCTPDHPVYTKNRGYVRADELTDDDELVVAI

SEQ ID NO: 399 - DNA, 306 bp, synthetic construct
  source 1..306: mol_type = other DNA
tgcctgagctacgagacagagatcctgaccgtggaatatggcctgctgccaatcggaaagatcgtggaaaagcggatcgagtgcaccgtctacagcgtggacaacaacggaaatatctatacacagcctgtggcccaatggcacgaccggggcgaacaggaggtgtttgagtactgcctggaagatggttctctgattagagccaccaaggaccacaagttcatgaccgtcgacggccagatgctgcccatcgacgaaatcttcgagcgggaactcgacctgatgagagtggataacctgcccaat

SEQ ID NO: 400 - protein, 102 aa, synthetic construct; identical to SEQ ID NO: 371

SEQ ID NO: 401 - protein, 101 aa, synthetic construct; identical to SEQ ID NO: 375

SEQ ID NO: 402 - protein, 102 aa, synthetic construct; identical to SEQ ID NO: 371

SEQ ID NO: 403 - DNA, 279 bp, synthetic construct
  source 1..279: mol_type = other DNA
acaagaagcggatactgtctggacctcaagacccaagtgcagacacctcagggcatgaaagagattagcaatatccaggtgggcgacctggtcctgagcaacaccggctacaacgaggtgctgaacgtgttccctaagtccaagaagaaatcttataagatcaccctggaagatggcaaggaaatcatctgcagcgaggaacacctgttccccacccagaccggcgagatgaacatcagcggcggactgaaggagggcatgtgcctgtacgtgaaggag

SEQ ID NO: 404 - protein, 93 aa, synthetic construct
TRSGYCLDLKTQVQTPQGMKEISNIQVGDLVLSNTGYNEVLNVFPKSKKKSYKITLEDGKEIICSEEHLFPTQTGEMNISGGLKEGMCLYVKE

SEQ ID NO: 405 - DNA, 282 bp, synthetic construct
  source 1..282: mol_type = other DNA
tctcagctgaaccggtgcctgagcctggacaccatggtggtgacaaacggcaaggccatcgagatcagagatgtgaaggtgggagattggctggaaagcgaatgtggcccagtgcaggttacagaggtgctgcctatcatcaagcagcctgtctttgagattgtgctgaaaagcggaaaaaagatccgggtgtccgctaatcacaagttccccaccaaggacggcctcaagaccatcaacagcggcctgaaggtgggcgacttcctgagaagcagagccaag

SEQ ID NO: 406 - protein, 94 aa, synthetic construct
SQLNRCLSLDTMVVTNGKAIEIRDVKVGDWLESECGPVQVTEVLPIIKQPVFEIVLKSGKKIRVSANHKFPTKDGLKTINSGLKVGDFLRSRAK

SEQ ID NO: 407 - DNA, 318 bp, synthetic construct
  source 1..318: mol_type = other DNA
ggcatcggcggaggatgttttgtgcctggcaccctggtgaacacagagaatggcctgaagaaaatcgaggaaatcaaggtgggcgacaaggtgttcagccatacaggcaagctgcaggaggtggtggacaccctgatcttcgaccgggacgaggaaatcatctctatcaacggcattgattgcaccaagaaccacgagttctacgtgatcgataaggaaaacgctaatagagtgaacgaggacaacatccacctcttcgccagatgggtccacgccgaggaactggatatgaaaaagcacctgctgatcgagctggaa

SEQ ID NO: 408 - protein, 106 aa, synthetic construct
GIGGGCFVPGTLVNTENGLKKIEEIKVGDKVFSHTGKLQEVVDTLIFDRDEEIISINGIDCTKNHEFYVIDKENANRVNEDNIHLFARWVHAEELDMKKHLLIELE

SEQ ID NO: 409 - DNA, 330 bp, synthetic construct
  source 1..330: mol_type = other DNA
ggaacaaacccatgttgcctggtgggctctagcgagattatcacaagaaactacggcaagaccaccatcaaggaagtggtcgagatcttcgacaacgacaagaatatccaggtgctggccttcaacacccacaccgataatatcgagtgggcccctatcaaggccgctcagctgaccagacctaacgccgagctggttgaactggaaatcgacaccctgcacggcgtgaaaacaatccggtgcacccctgaccaccccgtgtacaccaagaacagaggctacgtgcgggccgacgagctgacagatgatgacgagctcgtggtggctatc

SEQ ID NO: 410 - protein, 110 aa, synthetic construct
GTNPCCLVGSSEIITRNYGKTTIKEVVEIFDNDKNIQVLAFNTHTDNIEWAPIKAAQLTRPNAELVELEIDTLHGVKTIRCTPDHPVYTKNRGYVRADELTDDDELVVAI

SEQ ID NO: 411 - DNA, 105 bp, synthetic construct
  source 1..105: mol_type = other DNA
gtcaagatcatcagcagaaagagcctgggcacccagaacgtgtacgatatcggagtgggcgagccccacaactttctgctcaagaatggcctggtggccagcaac

SEQ ID NO: 412 - protein, 35 aa, synthetic construct
VKIISRKSLGTQNVYDIGVGEPHNFLLKNGLVASN

SEQ ID NO: 413 - DNA, 114 bp, synthetic construct
  source 1..114: mol_type = other DNA
atgatgctgaaaaagatcctgaagatcgaggaactggatgagagagagctgatcgacatcgaagtgtctggcaatcacctgttctacgccaacgacatcctgacccacaacagc

SEQ ID NO: 414 - protein, 38 aa, synthetic construct
MMLKKILKIEELDERELIDIEVSGNHLFYANDILTHNS

SEQ ID NO: 415 - DNA, 138 bp, synthetic construct
  source 1..138: mol_type = other DNA
atgtgcgaaatcttcgagaacgagattgattgggacgaaatcgcctctatcgagtacgtgggcgtggaagagacaatcgacatcaacgtgaccaacgacagactgtttttcgccaatggcatcctgacccacaacagc

SEQ ID NO: 416 - protein, 46 aa, synthetic construct
MCEIFENEIDWDEIASIEYVGVEETIDINVTNDRLFFANGILTHNS

SEQ ID NO: 417 - DNA, 123 bp, synthetic construct
  source 1..123: mol_type = other DNA
atgaaattcaagctgaaggaaatcaccagcatcgagacaaagcactacaagggcaaggtgcacgatctgaccgtgaaccaggaccacagctacaacgtcagaggcaccgtggtgcataattct

SEQ ID NO: 418 - protein, 41 aa, synthetic construct
MKFKLKEITSIETKHYKGKVHDLTVNQDHSYNVRGTVVHNS

SEQ ID NO: 419 - DNA, 123 bp, synthetic construct
  source 1..123: mol_type = other DNA
atggaagccaagacctacatcggcaagctgaaatctagaaagatcgtgtccaacgaggatacatacgacatccagaccagcacccacaatttcttcgccaacgacatcctggtgcacaacagc

SEQ ID NO: 420 - protein, 41 aa, synthetic construct
MEAKTYIGKLKSRKIVSNEDTYDIQTSTHNFFANDILVHNS

SEQ ID NO: 421 - DNA, 108 bp, synthetic construct
  source 1..108: mol_type = other DNA
atgatcaagatcgccacaagaaagtacctgggcaagcagaacgtgtacgacatcggcgtggagagagaccacaacttcgccctgaagaacggctttatcgcctctaat

SEQ ID NO: 422 - protein, 36 aa, synthetic construct; identical to SEQ ID NO: 373

SEQ ID NO: 423 - protein, 36 aa, synthetic construct
MVKIISRKSLGTQNVYDIGVGEPHNFLLKNGLVASN

SEQ ID NO: 424 - protein, 35 aa, synthetic construct
IKIATRKYLGKQNVYDIGVERDHNFALKNGFIASN

SEQ ID NO: 425 - DNA, 88 bp, synthetic construct
  source 1..88: mol_type = other DNA; note = SaCas9 scaffold sequence
gttttagtactctgtaatgaaaattacagaatctactaaaacaaggcaaaatgccgtgtttatctcgtcaacttgttggcgagatttt

SEQ ID NO: 426 - protein, 147 aa, Homo sapiens
MVHLTPEEKSAVTALWGKVNVDEVGGEALGRLLVVYPWTQRFFESFGDLSTPDAVMGNPKVKAHGKKVLGAFSDGLAHLDNLKGTFATLSELHCDKLHVDPENFRLLGNVLVCVLAHHFGKEFTPPVQAAYQKVVAGVANALAHKYH

SEQ ID NO: 427 - DNA, 628 bp, Homo sapiens
  source 1..628: mol_type = other DNA
acatttgcttctgacacaactgtgttcactagcaacctcaaacagacaccatggtgcatctgactcctgaggagaagtctgccgttactgccctgtggggcaaggtgaacgtggatgaagttggtggtgaggccctgggcaggctgctggtggtctacccttggacccagaggttctttgagtcctttggggatctgtccactcctgatgctgttatgggcaaccctaaggtgaaggctcatggcaagaaagtgctcggtgcctttagtgatggcctggctcacctggacaacctcaagggcacctttgccacactgagtgagctgcactgtgacaagctgcacgtggatcctgagaacttcaggctcctgggcaacgtgctggtctgtgtgctggcccatcactttggcaaagaattcaccccaccagtgcaggctgcctatcagaaagtggtggctggtgtggctaatgccctggcccacaagtatcactaagctcgctttcttgctgtccaatttctattaaaggttcctttgttccctaagtccaactactaaactgggggatattatgaagggccttgagcatctggattctgcctaataaaaaacatttattttcattgcaa

SEQ ID NO: 428 - DNA, 1608 bp, Homo sapiens
  source 1..1608: mol_type = genomic DNA
acatttgcttctgacacaactgtgttcactagcaacctcaaacagacaccatggtgcatctgactcctgaggagaagtctgccgttactgccctgtggggcaaggtgaacgtggatgaagttggtggtgaggccctgggcaggttggtatcaaggttacaagacaggtttaaggagaccaatagaaactgggcatgtggagacagagaagactcttgggtttctgataggcactgactctctctgcctattggtctattttcccacccttaggctgctggtggtctacccttggacccagaggttctttgagtcctttggggatctgtccactcctgatgctgttatgggcaaccctaaggtgaaggctcatggcaagaaagtgctcggtgcctttagtgatggcctggctcacctggacaacctcaagggcacctttgccacactgagtgagctgcactgtgacaagctgcacgtggatcctgagaacttcagggtgagtctatgggacgcttgatgttttctttccccttcttttctatggttaagttcatgtcataggaaggggataagtaacagggtacagtttagaatgggaaacagacgaatgattgcatcagtgtggaagtctcaggatcgttttagtttcttttatttgctgttcataacaattgttttcttttgtttaattcttgctttctttttttttcttctccgcaatttttactattatacttaatgccttaacattgtgtataacaaaaggaaatatctctgagatacattaagtaacttaaaaaaaaactttacacagtctgcctagtacattactatttggaatatatgtgtgcttatttgcatattcataatctccctactttattttcttttatttttaattgatacataatcattatacatatttatgggttaaagtgtaatgttttaatatgtgtacacatattgaccaaatcagggtaattttgcatttgtaattttaaaaaatgctttcttcttttaatatacttttttgtttatcttatttctaatactttccctaatctctttctttcagggcaataatgatacaatgtatcatgcctctttgcaccattctaaagaataacagtgataatttctgggttaaggcaatagcaatatctctgcatataaatatttctgcatataaattgtaactgatgtaagaggtttcatattgctaatagcagctacaatccagctaccattctgcttttattttatggttgggataaggctggattattctgagtccaagctaggcccttttgctaatcatgttcatacctcttatcttcctcccacagctcctgggcaacgtgctggtctgtgtgctggcccatcactttggcaaagaattcaccccaccagtgcaggctgcctatcagaaagtggtggctggtgtggctaatgccctggcccacaagtatcactaagctcgctttcttgctgtccaatttctattaaaggttcctttgttccctaagtccaactactaaactgggggatattatgaagggccttgagcatctggattctgcctaataaaaaacatttattttcattgcaa

SEQ ID NO: 429 - protein, 147 aa, Homo sapiens
MGHFTEEDKATITSLWGKVNVEDAGGETLGRLLVVYPWTQRFFDSFGNLSSASAIMGNPKVKAHGKKVLTSLGDAIKHLDDLKGTFAQLSELHCDKLHVDPENFKLLGNVLVTVLAIHFGKEFTPEVQASWQKMVTAVASALSSRYH

SEQ ID NO: 430 - DNA, 11382 bp, Homo sapiens
  source 1..11382: mol_type = genomic DNA
ccttctcacttgggtaggctctgtcagagggaaagtctaggcctcaaggctgagacttttgtcccatgaggtgttcccttgatgtagcacagtcccccttttcctaggcgtggggcttcctgagagccgaactgtagtgattgttatctctcttctggatctagccacccatcaggtctaccagactccaggctggtactggggtttgtctgcacagagtcttgtgacgtgaaccatctgtgggtctctcagccatagatacaaccacctgctccaatggaggtggcagaggatgaaatggactctgtgagggtccttacttttggttgttcaatgcactatttttgtgctggttggcctcctgccaggaggtggcactttctagaaagcatcagcagaggcagtcaggtggtggtggctgggggggctggggcaccctagaactcccaagaatatatgccctttgtcttcagctaccagggtgagtaaggaaggaccatcaggtgggggcaggactagtcgtgtctgagctcagagtctccttgggcaggtctttctgtggctactgtgggaggatgggggtgtagtttccaggtcaatggatttatgttcctaggacaattatggctgcctctgctgtgtcatgcaggtcatcaggaaagtgggggaaagcaagcagtcacgtgacttgcccagctcccatgcaactcaaaaggttggtctcacttccagcgtgcaccctcccccgcaacagcaccgaatctgtttccatgcagtcagtgagcaaggctgagaacttgccccaggctaccagctgcgaaaccaagtagggctgtcctacttccctgccagtggagtctgcacaccaaattcatgtccccccaccaacccccccactgcccagcccctagatctggccaggtggagattttctttttcctgtcatcttttcccagttcctctggcagccctcccaaatgacccctgtgaggcaaggcagaaatggcttcctaggggacccagagagcccacagggcttttcccgctgcttcctctacccctgtattttgcttggccctctaaattgactcagctccaggtaaggtcagaatcttctcctgtggtctagatcttcaggttccccagtgaggatgtgtgtttgggggtagacggtcccccttttccacttccacagtttgggcactcacaatatttggggtgtttcccgggtcctgcaggagcaatctgcttctttcagagggtgtgtgcgttctctcagctttcttgatttatttctgcaggtggttctgcaaaaaaaattcctgatgggagacttcacatgctgctctgtgcatccgagtgggagctgcaatgtacttctgctgcctcccatctgccatcaccctctaatttgtcggtaatatgcatttttaatcaatctttttttctctctctctctttttcttctcccccaaaactatactgccctttgatatcaaggaatcaaggacgtgatgttgaggggtgggcagtggatacactctttaccccttagggagctatatctagatttagatattgccaattcaagataacttaattgaaagcaaattcataatgaatacacacacacacacacacatctgcatgacaagatttttaatagttgaaagaataactaataattgtccacaggcaataagggctttttaagcaaaacagttgtgataaacaggtcattcttagaatagtaatccagccaatagtacaggttgcttagagattatgtcattaccagagttaaaattctataatggcttctcactccctaccactgaggacaagtttatgtccttaggtttatgcttccctgaaacaataccacctgctattctccactttacatatcaacggcactggttctttatctaactctctggcacagcaggagtttgttttcttctgcttcagagctttgaatttactatttcagcttctaaactttatttggcaatgccttcccatggcagattccttctgtcattttgcctctgttcgaatactttctccttaatttcattcttagttaataatatctgaaattattttgttgtttaacttaattattaattttatgtatgttctacctagattataatcttcagaggaaagttttattctctgacttatttaacttaaatgcccactactttaaaaattatgacatttatttaacagatatttgctgaacaaatgtttgaaaatacatgggaaagaatgcttgaaaacacttgaaattgcttgtgtaaagaaacagttttatcagttaggatttaatcaatgtcagaagcaatgatataggaaaaatcgaggaataagacagttatggataaggagaaatcaacaaactcttaaaagatattgcctcaaaagcataagaggaaataagggtttatacatgacttttagaacactgccttggtttttggataaatggggaagttgtttgaaaacaggagggatcctagatattccttagtctgaggaggagcaattaagattcacttgtttagaggctgggagtggtggctcacgcctgtaatcccagaattttgggaggccaaggcaggcagatcacctgaggtcaagagttcaagaccaacctggccaacatggtgaaatcccatctctacaaaaatacaaaaattagacaggcatgatggcaagtgcctgtaatcccagctacttgggaggctgaggaaggagaattgcttgaacctggaaggcaggagttgcagtgagccgagatcataccactgcactccagcctgggtgacagaacaagactctgtctcaaaaaaaaaaaagagagattcaaaagattcacttgtttaggccttagcgggcttagacaccagtctctgacacattcttaaaggtcaggctctacaaatggaacccaaccagactctcagatatggccaaagatctatacacacccatctcacagatcccctatcttaaagagaccctaatttgggttcacctcagtctctataatctgtaccagcataccaataaaaatctttctcacccatccttagattgagagaagtcacttattattatgtgagtaactggaagatactgataagttgacaaatctttttctttcctttcttattcaacttttattttaacttccaaagaacaagtgcaatatgtgcagctttgttgcgcaggtcaacatgtatctttctggtcttttagccgcctaacactttgagcagatataagccttacacaggattatgaagtctgaaaggattccaccaatattattataattcctatcaacctgataggttaggggaaggtagagctctcctccaataagccagatttccagagtttctgacgtcataatctaccaaggtcatggatcgagttcagagaaaaaacaaaagcaaaaccaaacctaccaaaaaataaaaatcccaaagaaaaaataaagaaaaaaacagcatgaatacttcctgccatgttaagtggccaatatgtcagaaacagcactgagttacagataaagatgtctaaactacagtgacatcccagctgtcacagtgtgtggactattagtcaataaaacagtccctgcctcttaagagttgttttccatgcaaatacatgtcttatgtcttagaataagattccctaagaagtgaacctagcatttatacaagataattaattctaatccatagtatctggtaaagagcattctaccatcatctttaccgagcatagaagagctacaccaaaaccctgggtcatcagccagcacatacacttatccagtgataaatacacatcatcgggtgcctacatacatacctgaatataaaaaaaatacttttgctgagatgaaacaggcgtgatttatttcaaataggtacggataagtagatattgaagtaaggattcagtcttatattatattacataacattaatctattcctgcactgaaactgttgctttataggatttttcactacactaatgagaacttaagagataatggcctaaaaccacagagagtatattcaaagataagtatagcacttcttatttggaaaccaatgcttactaaatgagactaagacgtgtcccatcaaaaatcctggacctatgcctaaaacacatttcacaatccctgaacttttcaaaaattggtacatgctttaactttaaactacaggcctcactggagctacagacaagaaggtgaaaaacggctgacaaaagaagtcctggtatcttctatggtgggagaagaaaactagctaaagggaagaataaattagagaaaaattggaatgactgaatcggaacaaggcaaaggctataaaaaaaattaagcagcagtatcctcttgggggccccttccccacactatctcaatgcaaatatctgtctgaaacggtccctggctaaactccacccatgggttggccagccttgccttgaccaatagccttgacaaggcaaacttgaccaatagtcttagagtatccagtgaggccaggggccggcggctggctagggatgaagaataaaaggaagcacccttcagcagttccacacactcgcttctggaacgtctgaggttatcaataagctcctagtccagacgccatgggtcatttcacagaggaggacaaggctactatcacaagcctgtggggcaaggtgaatgtggaagatgctggaggagaaaccctgggaaggtaggctctggtgaccaggacaagggagggaaggaaggaccctgtgcctggcaaaagtccaggtcgcttctcaggatttgtggcaccttctgactgtcaaactgttcttgtcaatctcacaggctcctggttgtctacccatggacccagaggttctttgacagctttggcaacctgtcctctgcctctgccatcatgggcaaccccaaagtcaaggcacatggcaagaaggtgctgacttccttgggagatgccataaagcacctggatgatctcaagggcacctttgcccagctgagtgaactgcactgtgacaagctgcatgtggatcctgagaacttcaaggtgagtccaggagatgtttcagcactgttgcctttagtctcgaggcaacttagacaactgagtattgatctgagcacagcagggtgtgagctgtttgaagatactggggttgggagtgaagaaactgcagaggactaactgggctgagacccagtggcaatgttttagggcctaaggagtgcctctgaaaatctagatggacaactttgactttgagaaaagagaggtggaaatgaggaaaatgacttttctttattagatttcggtagaaagaactttcacctttcccctatttttgttattcgttttaaaacatctatctggaggcaggacaagtatggtcattaaaaagatgcaggcagaaggcatatattggctcagtcaaagtggggaactttggtggccaaacatacattgctaaggctattcctatatcagctggacacatataaaatgctgctaatgcttcattacaaacttatatcctttaattccagatgggggcaaagtatgtccaggggtgaggaacaattgaaacatttgggctggagtagattttgaaagtcagctctgtgtgtgtgtgtgtgtgtgtgcgcgcgtgtgtttgtgtgtgtgtgagagcgtgtgtttcttttaacgttttcagcctacagcatacagggttcatggtggcaagaagataacaagatttaaattatggccagtgactagtgctgcaagaagaacaactacctgcatttaatgggaaagcaaaatctcaggctttgagggaagttaacataggcttgattctgggtggaagcttggtgtgtagttatctggaggccaggctggagctctcagctcactatgggttcatctttattgtctcctttcatctcaacagctcctgggaaatgtgctggtgaccgttttggcaatccatttcggcaaagaattcacccctgaggtgcaggcttcctggcagaagatggtgactggagtggccagtgccctgtcctccagataccactgagctcactgcccatgatgcagagctttcaaggataggctttattctgcaagcaatcaaataataaatctattctgctaagagatcacacatggttgtcttcagttctttttttatgtctttttaaatatatgagccacaaagggttttatgttgagggatgtgtttatgtgtatttatacatggctatgtgtgtttgtgtcatgtgcacactccacacttttttgtttacgttagatgtgggttttgatgagcaaataaaagaactaggcaataaagaaacttgtacatgggagttctgcaagtgggagtaaaaggtgcaggagaaatctggttggaagaaagacctctataggacaggactcctcagaaacagatgttttggaagagatggggaaaggttcagtgaagggggctgaacccccttccctggattgcagcacagcagcgaggaaggggctcaacgaagaaaaagtgttccaagctttaggaagtcaaggtttaggcagggatagccattctattttattaggggcaatactatttccaacggcatctggcttttctcagcccttgtgaggctctacagggaggttgaggtgttagagatcagagcaggaaacaggtttttctttccacggtaactacaatgaagtgatccttactttactaaggaacttttcattttaagtgttgacgcatgcctaaagaggtgaaattaatcccatacccttaagtctacagactggtcacagcatttcaaggaggagacctcattgtaagcttctagggaggtggggacttaggtgaaggaaatgagccagcagaagctcacaagtcagcatcagcgtgtcatgtctcagcagcagaacagcacggtcagatgaaaatatagtgtgaagaatttgtataacattaattgagaaggcagattcactggagttcttatataattgaaagttaatgcacgttaataagcaagagtttagtttaatgtgatggtgttatgaacttaacgcttgtgtctccagaaaattcacatgctgaatccccaactcccaattggctccatttgtgggggaggctttggaaaagtaatcaggtttagaggagctcatgagagcagatccccatcatagaattattttcctcatcagaagcagagagattagccatttctcttccttctggtgaggacacagtgggaagtcagccacctgcaacccaggaagagagccctgaccaggaaccagcagaaaagtgagaaaaaatcctgttgttgaagtcacccagtctatgctattttgttatagcaccttgcactaagtaaggcagatgaagaaagagaaaaaaataagcttcggtgttcagtggattagaaaccatgtttatctcaggtttacaaatctccacttgtcctctgtgtttcagaataaaataccaactctactactctcatctgtaagatgcaaatagtaagcctgagcccttctgtctaactttgaattctattttttcttcaacgtactttaggcttgtaatgtgtttatatacagtgaaatgtcaagttctttctttatatttctttctttcttttttttcctcagcctcagagttttccacatgcccttcctactttcaggaacttctttctccaaacgtcttctgcctggctccatcaaatcataaaggacccacttcaaatgccatcactcactaccatttcacaattcgcactttctttctttgtcctttttttttttagtaaaacaagtttataaaaaattgaaggaataaatgaatggctacttcataggcagagtagacgcaagggctactggttgccgatttttattgttatttttcaatagtatgctaaacaaggggtagattatttatgctgcccatttttagaccataaaagataacttcctgatgttgccatggcatttttttccttttaattttatttcatttcattttaatttcgaaggtacatgtgcaggatgtgcaggcttgttacatgggtaaatgtgtgtctttctggccttttagccatctgtatcaatgagcagatataagctttacacaggatcatgaaggatgaaagaatttcaccaatattataataatttcaatcaacctgatagcttaggggataaactaatttgaagatacagcttgcctccgataagccagaattccagagcttctggcattataatctagcaaggttagagatcatggatcactttcagagaaaaacaaaaacaaactaaccaaaagcaaaacagaaccaaaaaaccaccataaatacttcctaccctgttaatggtccaatatgtcagaaacagcactgtgttagaaataaagctgtctaaagtacactaatattcgagttataatagtgtgtggactattagtcaataaaaacaacccttgcctctttagagttgttttccatgtacacgcacatcttatgtcttagagtaagattccctgagaagtgaacctagcatttatacaagataattaattctaatccacagtacctgccaaagaacattctaccatcatctttactgagcatagaagagctacgccaaaaccctgggtcatcagccagcacacacacttatccagtggtaaatacacatcatctggtgtatacatacatacctgaatatggaatcaaatatttttctaagatgaaacagtcatgatttatttcaaataggtacggataagtagatattgaggtaagcattaggtcttatattatgtaacactaatctattactgcgctgaaactgtggctttatagaaattgttttcactgcactattgagaaattaagagataatggcaaaagtcacaaagagtatattcaaaaagaagtatagcactttttccttagaaaccactgctaactgaaagagactaagatttgtcccgtcaaaaatcctggacctatgcctaaaacacatttcacaatccctgaacttttcaaaaattggtacatgctttagctttaaactacaggcctcactggagctagagacaagaaggtaaaaaacggctgacaaaagaagtcctggtatcctctatgatgggagaaggaaactagctaaagggaagaataaattagagaaaaactggaatgactgaatcggaacaaggcaaaggctataaaaaaaattagcagtatcctcttgggggccccttccccacactatctcaatgcaaatatctgtctgaaacggtccctggctaaactccacccatgggttggccagccttgccttgaccaatagccttgacaaggcaaacttgaccaatagtcttagagtatccagtgaggccaggggccggcggctggctagggatgaagaataaaaggaagcacccttcagcagttccacacactcgcttctggaacgtctgaggttatcaataagctcctagtccagacgccatgggtcatttcacagaggaggacaaggctactatcacaagcctgtggggcaaggtgaatgtggaagatgctggaggagaaaccctgggaaggtaggctctggtgaccaggacaagggagggaaggaaggaccctgtgcctggcaaaagtccaggtcgcttctcaggatttgtggcaccttctgactgtcaaactgttcttgtcaatctcacaggctcctggttgtctacccatggacccagaggttctttgacagctttggcaacctgtcctctgcctctgccatcatgggcaaccccaaagtcaaggcacatggcaagaaggtgctgacttccttgggagatgccacaaagcacctggatgatctcaagggcacctttgcccagctgagtgaactgcactgtgacaagctgcatgtggatcctgagaacttcaaggtgagtccaggagatgtttcagccctgttgcctttagtctcgaggcaacttagacaacggagtattgatctgagcacagcagggtgtgagctgtttgaagatactggggttgggggtgaagaaactgcagaggactaactgggctgagacccagtggtaatgttttagggcctaaggagtgcctctaaaaatctagatggacaattttgactttgagaaaagagaggtggaaatgaggaaaatgacttttctttattagattccagtagaaagaactttcatctttccctcatttttgttgttttaaaacatctatctggaggcaggacaagtatggtcgttaaaaagatgcaggcagaaggcatatattggctcagtcaaagtggggaactttggtggccaaacatacattgctaaggctattcctatatcagctggacacatataaaatgctgctaatgcttcattacaaacttatatcctttaattccagatgggggcaaagtatgtccaggggtgaggaacaattgaaacatttgggctggagtagattttgaaagtcagctctgtgtgtgtgtgtgtgtgtgcgcgcgcgcgtgtgtgtgtgtgtgtcagcgtgtgtttcttttaacgtcttcagcctacaacatacagggttcatggtggcaagaagatagcaagatttaaattatggccagtgactagtgcttgaaggggaacaactacctgcatttaatgggaaggcaaaatctcaggctttgagggaagttaacataggcttgattctgggtggaagcttggtgtgtagttatctggaggccaggctggagctctcagctcactatgggttcatctttattgtctcctttcatctcaacagctcctgggaaatgtgctggtgaccgttttggcaatccatttcggcaaagaattcacccctgaggtgcaggcttcctggcagaagatggtgactgcagtggccagtgccctgtcctccagataccactgagctcactgcccatgattcagagctttcaaggataggctttattctgcaagcaatacaaataataaatctattctgctgagagatcacacatgattttcttcagctcttttttttacatctttttaaatatatgagccacaaagggtttatattgagggaagtgtgtatgtgtatttctgcatgcctgtttgtgtttgtggtgtgtgcatgctcctcatttatttttatatgagatgtgcattttgatgagcaaataaaagcagtaaagacacttgtacacgggagttctgcaagtgggagtaaatggtgtaggag

SEQ ID NO: 431 - protein, 147 aa, Homo sapiens
MGHFTEEDKATITSLWGKVNVEDAGGETLGRLLVVYPWTQRFFDSFGNLSSASAIMGNPKVKAHGKKVLTSLGDAIKHLDDLKGTFAQLSELHCDKLHVDPENFKLLGNVLVTVLAIHFGKEFTPEVQASWQKMVTGVASALSSRYH

SEQ ID NO: 432 - DNA, 13 bp, Homo sapiens
  source 1..13: mol_type = genomic DNA
ttgaccaatagcc

SEQ ID NO: 433 - DNA, 67 bp, Homo sapiens
  source 1..67: mol_type = genomic DNA
tggctaaactccacccatgggttggccagccttgccttgaccaatagccttgacaaggcaaacttga

SEQ ID NO: 434 - DNA, 67 bp, Homo sapiens
  source 1..67: mol_type = genomic DNA
tcaagtttgccttgtcaaggctattggtcaaggcaaggctggccaacccatgggtggagtttagcca

SEQ ID NO: 435 - protein, 8 aa, Homo sapiens
  VARIANT 8: note = is either S or P
  VARIANT 5: note = is either V or A
SKEVPTLH

SEQ ID NO: 436 - skipped

SEQ ID NO: 437 - DNA, 25 bp, Homo sapiens
  source 1..25: mol_type = genomic DNA
gcatctgactcctgtggagaagtct

SEQ ID NO: 438 - DNA, 25 bp, Homo sapiens
  source 1..25: mol_type = genomic DNA
agacttctccacaggagtcagatgc

SEQ ID NO: 439 - DNA, 23 bp, Homo sapiens
  source 1..23: mol_type = genomic DNA
acttctccacaggagtcagatgc

SEQ ID NO: 440 - DNA, 23 bp, Homo sapiens
  source 1..23: mol_type = other DNA
cttgaccaatagccttgacaagg

SEQ ID NO: 441 - RNA, 100 nt, synthetic construct
  source 1..100: mol_type = other RNA
ttctccacaggagtcaggtggttttagagctagaaatagcaagttaaaataaggctagtccgttatcaacttgaaaaagtggcaccgagtcggtgctttt

SEQ ID NO: 442 - RNA, 114 nt, synthetic construct
  source 1..114: mol_type = other RNA
ttctccacaggagtcaggtggttttagagccggcggaaacgccggcaagttaaaataaggctagtccgttatcaacttggacttcggtccaagtggcaccgagtcggtgctttt

SEQ ID NO: 443 - RNA, 100 nt, synthetic construct
  source 1..100: mol_type = other RNA
nnnnnnnnnnnnnnnnnnnngttttagagctagaaatagcaagttaaaataaggctagtccgttatcaacttgaaaaagtggcaccgagtcggtgctttt

SEQ ID NO: 444 - RNA, 114 nt, synthetic construct
  source 1..114: mol_type = other RNA
nnnnnnnnnnnnnnnnnnnngttttagagccggcggaaacgccggcaagttaaaataaggctagtccgttatcaacttggacttcggtccaagtggcaccgagtcggtgctttt

SEQ ID NO: 445 - RNA, 20 nt, synthetic construct
  source 1..20: mol_type = other RNA
ttctccacaggagtcaggtg

SEQ ID NO: 446 - RNA, 20 nt, synthetic construct
  source 1..20: mol_type = other RNA
acttctccacaggagtcagg

SEQ ID NO: 447 - RNA, 21 nt, synthetic construct
  source 1..21: mol_type = other RNA
gacttctccacaggagtcagg

SEQ ID NO: 448 - RNA, 19 nt, synthetic construct
  source 1..19: mol_type = other RNA
cttctccacaggagtcagg

SEQ ID NO: 449 - RNA, 20 nt, synthetic construct
  source 1..20: mol_type = other RNA
cttctccacaggagtcagat

SEQ ID NO: 450 - RNA, 21 nt, synthetic construct
  source 1..21: mol_type = other RNA
acttctccacaggagtcagat

SEQ ID NO: 451 - RNA, 22 nt, synthetic construct
  source 1..22: mol_type = other RNA
gacttctccacaggagtcagat

SEQ ID NO: 452 - RNA, 22 nt, synthetic construct
  source 1..22: mol_type = other RNA
tctgactcctgtggagaagtct

SEQ ID NO: 453 - RNA, 22 nt, synthetic construct
  source 1..22: mol_type = other RNA
agacttctccacaggagtcaga

SEQ ID NO: 454 - RNA, 20 nt, synthetic construct
  source 1..20: mol_type = other RNA
tccacaggagtcagatgcac

SEQ ID NO: 455 - RNA, 20 nt, synthetic construct
  source 1..20: mol_type = other RNA
gtggggaaggggcccccaag

SEQ ID NO: 456 - RNA, 20 nt, synthetic construct
  source 1..20: mol_type = other RNA
attgagatagtgtggggaag

SEQ ID NO: 457 - RNA, 20 nt, synthetic construct
  source 1..20: mol_type = other RNA
cattgagatagtgtggggaa

SEQ ID NO: 458 - RNA, 20 nt, synthetic construct
  source 1..20: mol_type = other RNA
gcattgagatagtgtgggga

SEQ ID NO: 459 - RNA, 20 nt, synthetic construct
  source 1..20: mol_type = other RNA
gctattggtcaaggcaaggc

SEQ ID NO: 460 - RNA, 20 nt, synthetic construct
  source 1..20: mol_type = other RNA
caaggctattggtcaaggca

SEQ ID NO: 461 - RNA, 20 nt, synthetic construct
  source 1..20: mol_type = other RNA
cttgtcaaggctattggtca

SEQ ID NO: 462 - RNA, 20 nt, synthetic construct
  source 1..20: mol_type = other RNA
cttgaccaatagccttgaca

SEQ ID NO: 463 - RNA, 20 nt, synthetic construct
  source 1..20: mol_type = other RNA
gtttgccttgtcaaggctat

SEQ ID NO: 464 - RNA, 20 nt, synthetic construct
  source 1..20: mol_type = other RNA
tggtcaagtttgccttgtca

SEQ ID NO: 465 - RNA, 20 nt, synthetic construct
  source 1..20: mol_type = other RNA
tggggaaggggcccccaaga

SEQ ID NO: 466 - RNA, 20 nt, synthetic construct
  source 1..20: mol_type = other RNA
gtgtggggaaggggccccca

SEQ ID NO: 467 - RNA, 20 nt, synthetic construct
  source 1..20: mol_type = other RNA
tcagacagatatttgcattg

SEQ ID NO: 468 - RNA, 20 nt, synthetic construct
  source 1..20: mol_type = other RNA
tttcagacagatatttgcat

SEQ ID NO: 469 - RNA, 20 nt, synthetic construct
  source 1..20: mol_type = other RNA
cttgccttgaccaatagcct

SEQ ID NO: 470 - RNA, 20 nt, synthetic construct
  source 1..20: mol_type = other RNA
tagccttgacaaggcaaact

SEQ ID NO: 471 - RNA, 20 nt, synthetic construct
  source 1..20: mol_type = other RNA
caaacttgaccaatagtctt

SEQ ID NO: 472 - RNA, 20 nt, synthetic construct
  source 1..20: mol_type = other RNA
tgtggggaaggggcccccaa

SEQ ID NO: 473 - RNA, 20 nt, synthetic construct
  source 1..20: mol_type = other RNA
gggccccttccccacactat

SEQ ID NO: 474 - RNA, 20 nt, synthetic construct
  source 1..20: mol_type = other RNA
cagacagatatttgcattga

SEQ ID NO: 475 - RNA, 20 nt, synthetic construct
  source 1..20: mol_type = other RNA
gccttgacaaggcaaacttg

SEQ ID NO: 476 - RNA, 20 nt, synthetic construct
  source 1..20: mol_type = other RNA
ttgacaaggcaaacttgacc

SEQ ID NO: 477 - RNA, 20 nt, synthetic construct
  source 1..20: mol_type = other RNA
tgaccaatagtcttagagta

SEQ ID NO: 478 - RNA, 23 nt, synthetic construct
  source 1..23: mol_type = other RNA
agacagatatttgcattgagata

SEQ ID NO: 479 - RNA, 20 nt, synthetic construct
  source 1..20: mol_type = other RNA
aagtttgccttgtcaaggct

SEQ ID NO: 480 - DNA, 933 bp, synthetic construct
  source 1..933: mol_type = other DNA
ccggaattgccagctggggcgccctctggtaaggttgggaagccctgcaaagtaaactggatggctttcttgccgccaaggatctgatggcgcaggggatcaagatctgatcaagagacaggatgaggatcctttcgcatgatcgaataagatggattgcacgcaggttctccggccgcttaggtggagcgcctattcggctatgactgggcacaacagacaatcggctgctctgatgccgccgtgttccggctgtcagcgcaggggcgcccggttctttttgtcaagaccgacctgtccggtgccctgaatgaactgcaggacgaggcagcgcggctatcgtggctggccacgacgggcgttccttgcgcagctgtgctcgacgttgtcactgaagcgggaagggactggctgctattgggcgaagtgccggggcaggatctcctgtcatctcaccttgctcctgccgagaaagtatccatcatggctgatgcaatgcggcggctgcatacgcttgatccggctacctgcccattcgaccaccaagcgaaacatcgcatcgagcgagcacgtactcggatggaagccggtcttgtcgatcaggatgatctggacgaagagcatcaggggctcgcgccagccgaactgttcgccaggctcaaggcgcgcatgcccgacggcgaggatctcgtcgtgacccatggcgatgcctgcttgccgaatatcatggtggaaaatggccgcttttctggattcattaactgtggccggctgggtgtggcggaccgctatcaggacatagcgttggctacccgtgatattgctgaagagcttggcggcgaatgggctgaccgcttcctcgtgctttacggtatcgccgctcccgattcgcagcgcatcgccttctatcgccttcttgacgagttcttctaa

SEQ ID NO: 481 - RNA, 20 nt, synthetic construct
  source 1..20: mol_type = other RNA
ataatagctggcatcacggt

SEQ ID NO: 482 - protein, 1588 aa, synthetic construct
MSEVEFSHEYWMRHALTLAKRARDEREVPVGAVLVLNNRVIGEGWNRAIGLHDPTAHAEIMALRQGGLVMQNYRLYDATLYSTFEPCVMCAGAMIHSRIGRVVFGVRNAKTGAAGSLMDVLHHPGMNHRVEITEGILADECAALLCRFYRMPRRVFNAQKKAQSSTDSGGSSGGSSGSETPGTSESATPESSGGSSGGSDKKYSIGLAIGTNSVGWAVITDEYKVPSKKFKVLGNTDRHSIKKNLIGALLFDSGETAEATRLKRTARRRYTRRKNRICYLQEIFSNEMAKVDDSFFHRLEESFLVEEDKKHERHPIFGNIVDEVAYHEKYPTIYHLRKKLVDSTDKADLRLIYLALAHMIKFRGHFLIEGDLNPDNSDVDKLFIQLVQTYNQLFEENPINASGVDAKAILSARLSKSRRLENLIAQLPGEKKNGLFGNLIALSLGLTPNFKSNFDLAEDAKLQLSKDTYDDDLDNLLAQIGDQYADLFLAAKNLSDAILLSDILRVNTEITKAPLSASMVKRYDEHHQDLTLLKALVRQQLPEKYKEIFFDQSKNGYAGYIDGGASQEEFYKFIKPILEKMDGTEELLVKLNREDLLRKQRTFDNGIIPHQIHLGELHAILRRQGDFYPFLKDNREKIEKILTFRIPYYVGPLARGNSRFAWMTRKSEETITPWNFEEVVDKGASAQSFIERMTNFDKNLPNEKVLPKHSLLYEYFTVYNELTKVKYVTEGMRKPAFLSGEQKKAIVDLLFKTNRKVTVKQLKEDYFKKIECFDSVEISGVEDRFNASLGTYHDLLKIIKDKDFLDNEENEDILEDIVLTLTLFEDREMIEERLKTYAHLFDDKVMKQLKRLRYTGWGRLSRKLINGIRDKQSGKTILDFLKSDGFANRNFMQLIHDDSLTFKEDIQKAQVSGQGDSLHEHIANLAGSPAIKKGILQTVKVVDELVKVMGGHKPENIVIEMARENQTTQKGQKNSRERMKRIEEGIKELGSQILKEHPVENTQLQNEKLYLYYLQNGRDMYVDQELDINRLSDYDVDHIVPQSFLKDDSIDNKVLTRSDKNRGKSDNVPSEEVVKKMKNYWRQLLNAKLITQRKFDNLTKAERGGLSELDKAGFIKRQLVETRQITKHVAQILDSRMNTKYDENDKLIREVKVITLKSKLVSDFRKDFQFYKVREINNYHHAHDAYLNAVVGTALIKKYPKLESEFVYGDYKVYDVRKMIAKSEQEIGKATAKYFFYSNIMNFFKTEITLANGEIRKRPLIETNGETGEIVWDKGRDFATVRKVLSMPQVNIVKKTEVQTGGFSKESILPKGNSDKLIARKKDWDPKKYGGFNSPTVAYSVLVVAKVEKGKSKKLKSVKELLGITIMERSSFEKNPIDFLEAKGYKEVKKDLIIKLPKYSLFELENGRKRMLASAGVLQKGNELALPSKYVNFLYLASHYEKLKGSPEDNEQKQLFVEQHKHYLDEIIEQISEFSKRVILADANLDKVLSAYNKHRDKPIREQAENIIHLFTLTNLGAPAAFKYFDTTINRKQYNTTKEVLDATLIRQSITGLYETRIDLSQLGGDEGADKRTADGSEFESPKKKRKV

SEQ ID NO: 483 - DNA, 4831 bp, synthetic construct
  source 1..4831: mol_type = other DNA
taatacgactcactataaggaaataagagagaaaagaagagtaagaagaaatataagagccaccatgtccgaagtcgagttttcccatgagtactggatgagacacgcattgactctcgcaaagagggctcgagatgaacgcgaggtgcccgtgggggcagtactcgtgctcaacaatcgcgtaatcggcgaaggttggaatagggcaatcggactccacgaccccactgcacatgcggaaatcatggcccttcgacagggagggcttgtgatgcagaattatcgactttatgatgcgacgctgtactcgacgtttgaaccttgcgtaatgtgcgcgggagctatgattcactcccgcattggacgagttgtattcggtgttcgcaacgccaagacgggtgccgcaggttcactgatggacgtgctgcatcatccaggcatgaaccaccgggtagaaatcacagaaggcatattggcggacgaatgtgcggcgctgttgtgtcgtttttatcgcatgcccaggcgtgtctttaacgcccagaaaaaagcacaatcctctactgactccggcggaagcagcggaggatcttctggaagcgaaaccccaggcaccagcgagtctgccacaccagaatcatctggcggtagctccggcggcagcgacaagaagtattctatcggactggccatcggcaccaactctgttggatgggccgtgatcaccgacgagtacaaggtgcccagcaagaaattcaaggtgctgggcaacaccgacaggcacagcatcaagaagaacctgatcggcgcactgctgttcgactctggcgaaacagccgaggccaccagactgaagagaacagcccgcagacggtacaccagaagaaagaaccggatctgctacctccaagagatcttcagcaacgagatggccaaggtggacgacagcttcttccacagactggaagagtccttcctggtggaagaggacaagaagcacgagagacaccccatcttcggcaacatcgtggacgaggtggcctaccacgagaagtaccccaccatctaccacctgagaaagaaactggtggacagcaccgacaaggccgacctgagactgatctatctggccctggctcacatgatcaagttccggggccacttcctgatcgagggcgacctgaatcctgacaacagcgacgtggacaagctgttcatccagctggtgcagacctacaaccagctgttcgaggaaaaccccatcaacgccagcggagtggatgccaaggccatcctgtctgccagactgagcaagagcagacggctggaaaatctgatcgcccagctgcctggcgagaagaagaatggcctgttcggcaacctgattgccctgagcctgggcctgacacctaacttcaagagcaacttcgacctggccgaggacgccaaactgcagctgagcaaggacacctacgacgacgacctggacaatctgctggcccagatcggcgatcagtacgccgacttgtttctggccgccaagaatctgagcgacgccatcctgctgtccgacatcctgagagtgaacaccgagatcaccaaggcacctctgagcgcctctatggtcaagagatacgacgagcaccaccaggatctgaccctgctgaaggccctcgttagacagcagctgccagagaagtacaaagagattttcttcgaccagagcaagaacggctacgccggctacattgatggcggagccagccaagaggaattctacaagttcatcaagcccatcctcgagaagatggacggcaccgaggaactgctggtcaagctgaacagagaggacctgctgagaaagcagagaaccttcgacaacggcatcatccctcaccagatccacctgggagaactgcacgccattctgcggagacaaggggacttttacccattcctgaaggacaaccgggaaaagatcgagaaaatcctgaccttcaggatcccctactacgtgggaccactggccagaggcaatagcagattcgcctggatgaccagaaagagcgaggaaaccatcactccctggaacttcgaggaagtggtggacaagggcgccagcgctcagtccttcatcgagcggatgaccaacttcgataagaacctgcctaacgagaaggtgctgcccaagcacagcctgctgtacgagtacttcaccgtgtacaacgagctgaccaaagtgaaatacgtgaccgagggaatgagaaagcccgcctttctgagcggcgagcagaaaaaggccatcgtggatctgctgttcaagaccaaccggaaagtgaccgtgaagcagctgaaagaggactacttcaagaaaatcgagtgcttcgacagcgtcgagatctccggcgtggaagatcggttcaatgccagcctgggcacataccacgatctgctgaaaattatcaaggacaaggacttcctggacaacgaagagaacgaggacatccttgaggacatcgtgctgacactgaccctgtttgaggacagagagatgatcgaggaacggctgaaaacatacgcccacctgttcgacgacaaagtgatgaagcaactgaagcggctgagatacaccggctggggcagactgtctcggaagctgatcaacggcatccgggataagcagtccggcaagaccatcctggactttctgaagtccgacggcttcgccaacagaaacttcatgcagctgattcacgacgacagcctcaccttcaaagaggatatccagaaagcccaggtgtccggccagggcgattctctgcatgagcacattgccaacctggccggctctcccgccattaagaaaggcatcctgcagacagtgaaggtggtggacgagcttgtgaaagtgatgggcggacacaagcccgagaacatcgtgatcgaaatggccagagagaaccagaccacacagaagggacagaagaacagccgcgagagaatgaagcggatcgaagagggcatcaaagagctgggcagccagatcctgaaagaacaccccgtggaaaacacccagctgcagaacgagaagctgtacctgtactacctgcagaatggacgggatatgtacgtggaccaagagctggacatcaacagactgtccgactacgatgtggaccatatcgtgccccagtcttttctgaaggacgactccatcgacaacaaggtcctgaccagatccgacaagaatcggggcaagagcgacaacgtgccctccgaagaggtggtcaagaagatgaagaactactggcgacagctgctgaacgccaagctgattacccagcggaagttcgacaatctgaccaaggccgaaagaggcggcctgagcgaactggataaggccggcttcatcaagagacagctggtggaaacccggcagatcacaaagcacgtggcacagattctggactctcggatgaacactaagtacgacgagaacgacaaactgatccgcgaagtgaaagtcatcaccctgaagtccaagctggtgtccgatttccggaaggatttccagttctacaaagtgcgcgagatcaacaactaccatcacgcccacgacgcctacctgaatgccgttgttggaacagccctgatcaaaaagtaccctaagctggaaagcgagttcgtgtacggcgactacaaggtgtacgacgtgcggaagatgatcgccaagagcgagcaagagattggcaaggcaaccgccaagtacttcttctacagcaacatcatgaactttttcaagacagagatcaccctcgccaacggcgagatcagaaagcggcctctgatcgagacaaacggcgaaaccggcgagattgtgtgggataagggcagagactttgccacagtgcggaaagtgctgagcatgccccaagtgaatatcgtgaagaaaaccgaggtgcagacaggcggcttcagcaaagagtctatcctgcctaaggggaactccgacaagctgatcgccagaaagaaggactgggaccccaagaaatacggcggctttaactctcccaccgtggcctattctgttctggtggtggccaaagtggaaaagggcaagtccaagaaactcaagagcgtgaaagagctgctggggatcaccatcatggaaagaagcagcttcgagaagaatccgatcgatttcctcgaggccaagggttacaaagaagtgaaaaaggacctgatcatcaagctccccaagtactccctgttcgagctggaaaacggccggaagagaatgctggcctctgccggtgtcctgcagaagggaaacgaactggccctgcctagcaaatatgtgaacttcctgtacctggccagccactatgagaagctgaagggcagccccgaggacaatgagcaaaagcagctgtttgtggaacagcacaagcactacctggacgagatcatcgagcagatcagcgagtttagcaagagagtgattctggccgacgccaatctggacaaagtgctgtccgcctacaacaagcaccgggacaagcctatcagagagcaggccgagaatatcatccacctgtttaccctgaccaacctgggagcccctgcggccttcaagtactttgacaccaccatcaacaggaagcagtacaacaccaccaaagaggtgctggacgccactctgatccgccagtctatcaccggcctgtacgagacacggatcgacctgtctcaactcggaggcgacgaaggcgccgataagagaaccgccgatggctctgagttcgagagccctaagaaaaagcgcaaagtgtag

SEQ ID NO: 484 - protein, 1588 aa, synthetic construct
MSEVEFSHEYWMRHALTLAKRARDEREVPVGAVLVLNNRVIGEGWNRAIGLHDPTAHAEIMALRQGGLVMQNYRLYDATLYSTFEPCVMCAGAMIHSRIGRVVFGVRNAKTGAAGSLMDVLHHPGMNHRVEITEGILADECAALLCDFYRMPRRVFNAQKKAQSSINSGGSSGGSSGSETPGTSESATPESSGGSSGGSDKKYSIGLAIGTNSVGWAVITDEYKVPSKKFKVLGNTDRHSIKKNLIGALLFDSGETAEATRLKRTARRRYTRRKNRICYLQEIFSNEMAKVDDSFFHRLEESFLVEEDKKHERHPIFGNIVDEVAYHEKYPTIYHLRKKLVDSTDKADLRLIYLALAHMIKFRGHFLIEGDLNPDNSDVDKLFIQLVQTYNQLFEENPINASGVDAKAILSARLSKSRRLENLIAQLPGEKKNGLFGNLIALSLGLTPNFKSNFDLAEDAKLQLSKDTYDDDLDNLLAQIGDQYADLFLAAKNLSDAILLSDILRVNTEITKAPLSASMVKRYDEHHQDLTLLKALVRQQLPEKYKEIFFDQSKNGYAGYIDGGASQEEFYKFIKPILEKMDGTEELLVKLNREDLLRKQRTFDNGIIPHQIHLGELHAILRRQGDFYPFLKDNREKIEKILTFRIPYYVGPLARGNSRFAWMTRKSEETITPWNFEEVVDKGASAQSFIERMTNFDKNLPNEKVLPKHSLLYEYFTVYNELTKVKYVTEGMRKPAFLSGEQKKAIVDLLFKTNRKVTVKQLKEDYFKKIECFDSVEISGVEDRFNASLGTYHDLLKIIKDKDFLDNEENEDILEDIVLTLTLFEDREMIEERLKTYAHLFDDKVMKQLKRLRYTGWGRLSRKLINGIRDKQSGKTILDFLKSDGFANRNFMQLIHDDSLTFKEDIQKAQVSGQGDSLHEHIANLAGSPAIKKGILQTVKVVDELVKVMGGHKPENIVIEMARENQTTQKGQKNSRERMKRIEEGIKELGSQILKEHPVENTQLQNEKLYLYYLQNGRDMYVDQELDINRLSDYDVDHIVPQSFLKDDSIDNKVLTRSDKNRGKSDNVPSEEVVKKMKNYWRQLLNAKLITQRKFDNLTKAERGGLSELDKAGFIKRQLVETRQITKHVAQILDSRMNTKYDENDKLIREVKVITLKSKLVSDFRKDFQFYKVREINNYHHAHDAYLNAVVGTALIKKYPKLESEFVYGDYKVYDVRKMIAKSEQEIGKATAKYFFYSNIMNFFKTEITLANGEIRKRPLIETNGETGEIVWDKGRDFATVRKVLSMPQVNIVKKTEVQTGGFSKESILPKGNSDKLIARKKDWDPKKYGGFNSPTVAYSVLVVAKVEKGKSKKLKSVKELLGITIMERSSFEKNPIDFLEAKGYKEVKKDLIIKLPKYSLFELENGRKRMLASAGVLQKGNELALPSKYVNFLYLASHYEKLKGSPEDNEQKQLFVEQHKHYLDEIIEQISEFSKRVILADANLDKVLSAYNKHRDKPIREQAENIIHLFTLTNLGAPAAFKYFDTTINRKQYNTTKEVLDATLIRQSITGLYETRIDLSQLGGDEGADKRTADGSEFESPKKKRKV

SEQ ID NO: 485 - DNA, 4831 bp, synthetic construct
  source 1..4831: mol_type = other DNA
taatacgactcactataaggaaataagagagaaaagaagagtaagaagaaatataagagccaccatgtccgaagtcgagttttcccatgagtactggatgagacacgcattgactctcgcaaagagggctcgagatgaacgcgaggtgcccgtgggggcagtactcgtgctcaacaatcgcgtaatcggcgaaggttggaatagggcaatcggactccacgaccccactgcacatgcggaaatcatggcccttcgacagggagggcttgtgatgcagaattatcgactttatgatgcgacgctgtactcgacgtttgaaccttgcgtaatgtgcgcgggagctatgattcactcccgcattggacgagttgtattcggtgttcgcaacgccaagacgggtgccgcaggttcactgatggacgtgctgcatcatccaggcatgaaccaccgggtagaaatcacagaaggcatattggcggacgaatgtgcggcgctgttgtgtgacttttatcgcatgcccaggcgtgtctttaacgcccagaaaaaagcacaatcctctataaactccggcggaagcagcggaggatcttctggaagcgaaaccccaggcaccagcgagtctgccacaccagaatcatctggcggtagctccggcggcagcgacaagaagtattctatcggactggccatcggcaccaactctgttggatgggccgtgatcaccgacgagtacaaggtgcccagcaagaaattcaaggtgctgggcaacaccgacaggcacagcatcaagaagaacctgatcggcgcactgctgttcgactctggcgaaacagccgaggccaccagactgaagagaacagcccgcagacggtacaccagaagaaagaaccggatctgctacctccaagagatcttcagcaacgagatggccaaggtggacgacagcttcttccacagactggaagagtccttcctggtggaagaggacaagaagcacgagagacaccccatcttcggcaacatcgtggacgaggtggcctaccacgagaagtaccccaccatctaccacctgagaaagaaactggtggacagcaccgacaaggccgacctgagactgatctatctggccctggctcacatgatcaagttccggggccacttcctgatcgagggcgacctgaatcctgacaacagcgacgtggacaagctgttcatccagctggtgcagacctacaaccagctgttcgaggaaaaccccatcaacgccagcggagtggatgccaaggccatcctgtctgccagactgagcaagagcagacggctggaaaatctgatcgcccagctgcctggcgagaagaagaatggcctgttcggcaacctgattgccctgagcctgggcctgacacctaacttcaagagcaacttcgacctggccgaggacgccaaactgcagctgagcaaggacacctacgacgacgacctggacaatctgctggcccagatcggcgatcagtacgccgacttgtttctggccgccaagaatctgagcgacgccatcctgctgtccgacatcctgagagtgaacaccgagatcaccaaggcacctctgagcgcctctatggtcaagagatacgacgagcaccaccaggatctgaccctgctgaaggccctcgttagacagcagctgccagagaagtacaaagagattttcttcgaccagagcaagaacggctacgccggctacattgatggcggagccagccaagaggaattctacaagttcatcaagcccatcctcgagaagatggacggcaccgaggaactgctggtcaagctgaacagagaggacctgctgagaaagcagagaaccttcgacaacggcatcatccctcaccagatccacctgggagaactgcacgccattctgcggagacaaggggacttttacccattcctgaaggacaaccgggaaaagatcgagaaaatcctgaccttcaggatcccctactacgtgggaccactggccagaggcaatagcagattcgcctggatgaccagaaagagcgaggaaaccatcactccctggaacttcgaggaagtggtggacaagggcgccagcgctcagtccttcatcgagcggatgaccaacttcgataagaacctgcctaacgagaaggtgctgcccaagcacagcctgctgtacgagtacttcaccgtgtacaacgagctgaccaaagtgaaatacgtgaccgagggaatgagaaagcccgcctttctgagcggcgagcagaaaaaggccatcgtggatctgctgttcaagaccaaccggaaagtgaccgtgaagcagctgaaagaggactacttcaagaaaatcgagtgcttcgacagcgtcgagatctccggcgtggaagatcggttcaatgccagcctgggcacataccacgatctgctgaaaattatcaaggacaaggacttcctggacaacgaagagaacgaggacatccttgaggacatcgtgctgacactgaccctgtttgaggacagagagatgatcgaggaacggctgaaaacatacgcccacctgttcgacgacaaagtgatgaagcaactgaagcggctgagatacaccggctggggcagactgtctcggaagctgatcaacggcatccgggataagcagtccggcaagaccatcctggactttctgaagtccgacggcttcgccaacagaaacttcatgcagctgattcacgacgacagcctcaccttcaaagaggatatccagaaagcccaggtgtccggccagggcgattctctgcatgagcacattgccaacctggccggctctcccgccattaagaaaggcatcctgcagacagtgaaggtggtggacgagcttgtgaaagtgatgggcggacacaagcccgagaacatcgtgatcgaaatggccagagagaaccagaccacacagaagggacagaagaacagccgcgagagaatgaagcggatcgaagagggcatcaaagagctgggcagccagatcctgaaagaacaccccgtggaaaacacccagctgcagaacgagaagctgtacctgtactacctgcagaatggacgggatatgtacgtggaccaagagctggacatcaacagactgtccgactacgatgtggaccatatcgtgccccagtcttttctgaaggacgactccatcgacaacaaggtcctgaccagatccgacaagaatcggggcaagagcgacaacgtgccctccgaagaggtggtcaagaagatgaagaactactggcgacagctgctgaacgccaagctgattacccagcggaagttcgacaatctgaccaaggccgaaagaggcggcctgagcgaactggataaggccggcttcatcaagagacagctggtggaaacccggcagatcacaaagcacgtggcacagattctggactctcggatgaacactaagtacgacgagaacgacaaactgatccgcgaagtgaaagtcatcaccctgaagtccaagctggtgtccgatttccggaaggatttccagttctacaaagtgcgcgagatcaacaactaccatcacgcccacgacgcctacctgaatgccgttgttggaacagccctgatcaaaaagtaccctaagctggaaagcgagttcgtgtacggcgactacaaggtgtacgacgtgcggaagatgatcgccaagagcgagcaagagattggcaaggcaaccgccaagtacttcttctacagcaacatcatgaactttttcaagacagagatcaccctcgccaacggcgagatcagaaagcggcctctgatcgagacaaacggcgaaaccggcgagattgtgtgggataagggcagagactttgccacagtgcggaaagtgctgagcatgccccaagtgaatatcgtgaagaaaaccgaggtgcagacaggcggcttcagcaaagagtctatcctgcctaaggggaactccgacaagctgatcgccagaaagaaggactgggaccccaagaaatacggcggctttaactctcccaccgtggcctattctgttctggtggtggccaaagtggaaaagggcaagtccaagaaactcaagagcgtgaaagagctgctggggatcaccatcatggaaagaagcagcttcgagaagaatccgatcgatttcctcgaggccaagggttacaaagaagtgaaaaaggacctgatcatcaagctccccaagtactccctgttcgagctggaaaacggccggaagagaatgctggcctctgccggtgtcctgcagaagggaaacgaactggccctgcctagcaaatatgtgaacttcctgtacctggccagccactatgagaagctgaagggcagccccgaggacaatgagcaaaagcagctgtttgtggaacagcacaagcactacctggacgagatcatcgagcagatcagcgagtttagcaagagagtgattctggccgacgccaatctggacaaagtgctgtccgcctacaacaagcaccgggacaagcctatcagagagcaggccgagaatatcatccacctgtttaccctgaccaacctgggagcccctgcggccttcaagtactttgacaccaccatcaacaggaagcagtacaacaccaccaaagaggtgctggacgccactctgatccgccagtctatcaccggcctgtacgagacacggatcgacctgtctcaactcggaggcgacgaaggcgccgataagagaaccgccgatggctctgagttcgagagccctaagaaaaagcgcaaagtgtag

SEQ ID NO: 486 - protein, 1554 aa, synthetic construct
MDKKYSIGLAIGTNSVGWAVITDEYKVPSKKFKVLGNTDRHSIKKNLIGALLFDSGETAEATRLKRTARRRYTRRKNRICYLQEIFSNEMAKVDDSFFHRLEESFLVEEDKKHERHPIFGNIVDEVAYHEKYPTIYHLRKKLVDSTDKADLRLIYLALAHMIKFRGHFLIEGDLNPDNSDVDKLFIQLVQTYNQLFEENPINASGVDAKAILSARLSKSRRLENLIAQLPGEKKNGLFGNLIALSLGLTPNFKSNFDLAEDAKLQLSKDTYDDDLDNLLAQIGDQYADLFLAAKNLSDAILLSDILRVNTEITKAPLSASMIKRYDEHHQDLTLLKALVRQQLPEKYKEIFFDQSKNGYAGYIDGGASQEEFYKFIKPILEKMDGTEELLVKLNREDLLRKQRTFDNGSIPHQIHLGELHAILRRQEDFYPFLKDNREKIEKILTFRIPYYVGPLARGNSRFAWMTRKSEETITPWNFEEVVDKGASAQSFIERMTNFDKNLPNEKVLPKHSLLYEYFTVYNELTKVKYVTEGMRKPAFLSGEQKKAIVDLLFKTNRKVTVKQLKEDYFKKIECFDSVEISGVEDRFNASLGTYHDLLKIIKDKDFLDNEENEDILEDIVLTLTLFEDREMIEERLKTYAHLFDDKVMKQLKRRRYTGWGRLSRKLINGIRDKQSGKTILDFLKSDGFANRNFMQLIHDDSLTFKEDIQKAQVSGQGDSLHEHIANLAGSPAIKKGILQTVKVVDELVKVMGRHKPENIVIEMARENQTTQKGQKNSRERMKRIEEGIKELGSQILKEHPVENTQLQNEKLYLYYLQNGRDMYVDQELDINRLSDYDVDHIVPQSFLKDDSIDNKVLTRSDKNRGKSDNVPSEEVVKKMKNYWRQLLNAKLITQRKFDNLTKAERGGLSELDKAGFIKRQLVETRQITKHVAQILDSRMNTKYDENDKLIREVKVITLKSKLVSDFRKDFQFYKVREINNYHHAHDAYLNAVVGTALIKKYPKLESEFVYGDYKVYDVRKMIAKSEQEIGSSGSETPGTSESATPESSGSEVEFSHEYWMRHALTLAKRARDEREVPVGAVLVLNNRVIGEGWNRAIGLHDPTAHAEIMALRQGGLVMQNYRLIDATLYSTFEPCVMCAGAMIHSRIGRVVFGVRNAKTGAAGSLMDVLHYPGMNHRVEITEGILADECAALLCYFFRMPRQVFNAQKKAQSSTDGKATAKYFFYSNIMNFFKTEITLANGEIRKRPLIETNGETGEIVWDKGRDFATVRKVLSMPQVNIVKKTEVQTGGFSKESILPKRNSDKLIARKKDWDPKKYGGFMQPTVAYSVLVVAKVEKGKSKKLKSVKELLGITIMERSSFEKNPIDFLEAKGYKEVKKDLIIKLPKYSLFELENGRKRMLASAKFLQKGNELALPSKYVNFLYLASHYEKLKGSPEDNEQKQLFVEQHKHYLDEIIEQISEFSKRVILADANLDKVLSAYNKHRDKPIREQAENIIHLFTLTNLGAPRAFKYFDTTIARKEYRSTKEVLDATLIHQSITGLYETRIDLSQLGGD

SEQ ID NO: 487 - protein, 1588 aa, synthetic construct
MSEVEFSHEYWMRHALTLAKRARDEREVPVGAVLVLNNRVIGEGWNRAIGLHDPTAHAEIMALRQGGLVMQNYRLYDATLYTTFEPCVMCAGAMIHSRIGRVVFGVRNAKTGAAGSLMDVLHHPGMNHRVEITEGILADECAALLCRFYRMPRRVFNAQKKAQSSTDSGGSSGGSSGSETPGTSESATPESSGGSSGGSDKKYSIGLAIGTNSVGWAVITDEYKVPSKKFKVLGNTDRHSIKKNLIGALLFDSGETAEATRLKRTARRRYTRRKNRICYLQEIFSNEMAKVDDSFFHRLEESFLVEEDKKHERHPIFGNIVDEVAYHEKYPTIYHLRKKLVDSTDKADLRLIYLALAHMIKFRGHFLIEGDLNPDNSDVDKLFIQLVQTYNQLFEENPINASGVDAKAILSARLSKSRRLENLIAQLPGEKKNGLFGNLIALSLGLTPNFKSNFDLAEDAKLQLSKDTYDDDLDNLLAQIGDQYADLFLAAKNLSDAILLSDILRVNTEITKAPLSASMVKRYDEHHQDLTLLKALVRQQLPEKYKEIFFDQSKNGYAGYIDGGASQEEFYKFIKPILEKMDGTEELLVKLNREDLLRKQRTFDNGIIPHQIHLGELHAILRRQGDFYPFLKDNREKIEKILTFRIPYYVGPLARGNSRFAWMTRKSEETITPWNFEEVVDKGASAQSFIERMTNFDKNLPNEKVLPKHSLLYEYFTVYNELTKVKYVTEGMRKPAFLSGEQKKAIVDLLFKTNRKVTVKQLKEDYFKKIECFDSVEISGVEDRFNASLGTYHDLLKIIKDKDFLDNEENEDILEDIVLTLTLFEDREMIEERLKTYAHLFDDKVMKQLKRLRYTGWGRLSRKLINGIRDKQSGKTILDFLKSDGFANRNFMQLIHDDSLTFKEDIQKAQVSGQGDSLHEHIANLAGSPAIKKGILQTVKVVDELVKVMGGHKPENIVIEMARENQTTQKGQKNSRERMKRIEEGIKELGSQILKEHPVENTQLQNEKLYLYYLQNGRDMYVDQELDINRLSDYDVDHIVPQSFLKDDSIDNKVLTRSDKNRGKSDNVPSEEVVKKMKNYWRQLLNAKLITQRKFDNLTKAERGGLSELDKAGFIKRQLVETRQITKHVAQILDSRMNTKYDENDKLIREVKVITLKSKLVSDFRKDFQFYKVREINNYHHAHDAYLNAVVGTALIKKYPKLESEFVYGDYKVYDVRKMIAKSEQEIGKATAKYFFYSNIMNFFKTEITLANGEIRKRPLIETNGETGEIVWDKGRDFATVRKVLSMPQVNIVKKTEVQTGGFSKESILPKGNSDKLIARKKDWDPKKYGGFNSPTVAYSVLVVAKVEKGKSKKLKSVKELLGITIMERSSFEKNPIDFLEAKGYKEVKKDLIIKLPKYSLFELENGRKRMLASAGVLQKGNELALPSKYVNFLYLASHYEKLKGSPEDNEQKQLFVEQHKHYLDEIIEQISEFSKRVILADANLDKVLSAYNKHRDKPIREQAENIIHLFTLTNLGAPAAFKYFDTTINRKQYNTTKEVLDATLIRQSITGLYETRIDLSQLGGDEGADKRTADGSEFESPKKKRKV

SEQ ID NO: 488 - DNA, 4767 bp, synthetic construct
  source 1..4767: mol_type = other DNA
atgtccgaagtcgagttttcccatgagtactggatgagacacgcattgactctcgcaaagagggctcgagatgaacgcgaggtgcccgtgggggcagtactcgtgctcaacaatcgcgtaatcggcgaaggttggaatagggcaatcggactccacgaccccactgcacatgcggaaatcatggcccttcgacagggagggcttgtgatgcagaattatcgactttatgatgcgacgctgtacaccacgtttgaaccttgcgtaatgtgcgcgggagctatgattcactcccgcattggacgagttgtattcggtgttcgcaacgccaagacgggtgccgcaggttcactgatggacgtgctgcatcatccaggcatgaaccaccgggtagaaatcacagaaggcatattggcggacgaatgtgcggcgctgttgtgtcgtttttatcgcatgcccaggcgtgtctttaacgcccagaaaaaagcacaatcctctactgactccggcggaagcagcggaggatcttctggaagcgaaaccccaggcaccagcgagtctgccacaccagaatcatctggcggtagctccggcggcagcgacaagaagtattctatcggactggccatcggcaccaactctgttggatgggccgtgatcaccgacgagtacaaggtgcccagcaagaaattcaaggtgctgggcaacaccgacaggcacagcatcaagaagaacctgatcggcgcactgctgttcgactctggcgaaacagccgaggccaccagactgaagagaacagcccgcagacggtacaccagaagaaagaaccggatctgctacctccaagagatcttcagcaacgagatggccaaggtggacgacagcttcttccacagactggaagagtccttcctggtggaagaggacaagaagcacgagagacaccccatcttcggcaacatcgtggacgaggtggcctaccacgagaagtaccccaccatctaccacctgagaaagaaactggtggacagcaccgacaaggccgacctgagactgatctatctggccctggctcacatgatcaagttccggggccacttcctgatcgagggcgacctgaatcctgacaacagcgacgtggacaagctgttcatccagctggtgcagacctacaaccagctgttcgaggaaaaccccatcaacgccagcggagtggatgccaaggccatcctgtctgccagactgagcaagagcagacggctggaaaatctgatcgcccagctgcctggcgagaagaagaatggcctgttcggcaacctgattgccctgagcctgggcctgacacctaacttcaagagcaacttcgacctggccgaggacgccaaactgcagctgagcaaggacacctacgacgacgacctggacaatctgctggcccagatcggcgatcagtacgccgacttgtttctggccgccaagaatctgagcgacgccatcctgctgtccgacatcctgagagtgaacaccgagatcaccaaggcacctctgagcgcctctatggtcaagagatacgacgagcaccaccaggatctgaccctgctgaaggccctcgttagacagcagctgccagagaagtacaaagagattttcttcgaccagagcaagaacggctacgccggctacattgatggcggagccagccaagaggaattctacaagttcatcaagcccatcctcgagaagatggacggcaccgaggaactgctggtcaagctgaacagagaggacctgctgagaaagcagagaaccttcgacaacggcatcatccctcaccagatccacctgggagaactgcacgccattctgcggagacaaggggacttttacccattcctgaaggacaaccgggaaaagatcgagaaaatcctgaccttcaggatcccctactacgtgggaccactggccagaggcaatagcagattcgcctggatgaccagaaagagcgaggaaaccatcactccctggaacttcgaggaagtggtggacaagggcgccagcgctcagtccttcatcgagcggatgaccaacttcgataagaacctgcctaacgagaaggtgctgcccaagcacagcctgctgtacgagtacttcaccgtgtacaacgagctgaccaaagtgaaatacgtgaccgagggaatgagaaagcccgcctttctgagcggcgagcagaaaaaggccatcgtggatctgctgttcaagaccaaccggaaagtgaccgtgaagcagctgaaagaggactacttcaagaaaatcgagtgcttcgacagcgtcgagatctccggcgtggaagatcggttcaatgccagcctgggcacataccacgatctgctgaaaattatcaaggacaaggacttcctggacaacgaagagaacgaggacatccttgaggacatcgtgctgacactgaccctgtttgaggacagagagatgatcgaggaacggctgaaaacatacgcccacctgttcgacgacaaagtgatgaagcaactgaagcggctgagatacaccggctggggcagactgtctcggaagctgatcaacggcatccgggataagcagtccggcaagaccatcctggactttctgaagtccgacggcttcgccaacagaaacttcatgcagctgattcacgacgacagcctcaccttcaaagaggatatccagaaagcccaggtgtccggccagggcgattctctgcatgagcacattgccaacctggccggctctcccgccattaagaaaggcatcctgcagacagtgaaggtggtggacgagcttgtgaaagtgatgggcggacacaagcccgagaacatcgtgatcgaaatggccagagagaaccagaccacacagaagggacagaagaacagccgcgagagaatgaagcggatcgaagagggcatcaaagagctgggcagccagatcctgaaagaacaccccgtggaaaacacccagctgcagaacgagaagctgtacctgtactacctgcagaatggacgggatatgtacgtggaccaagagctggacatcaacagactgtccgactacgatgtggaccatatcgtgccccagtcttttctgaaggacgactccatcgacaacaaggtcctgaccagatccgacaagaatcggggcaagagcgacaacgtgccctccgaagaggtggtcaagaagatgaagaactactggcgacagctgctgaacgccaagctgattacccagcggaagttcgacaatctgaccaaggccgaaagaggcggcctgagcgaactggataaggccggcttcatcaagagacagctggtggaaacccggcagatcacaaagcacgtggcacagattctggactctcggatgaacactaagtacgacgagaacgacaaactgatccgcgaagtgaaagtcatcaccctgaagtccaagctggtgtccgatttccggaaggatttccagttctacaaagtgcgcgagatcaacaactaccatcacgcccacgacgcctacctgaatgccgttgttggaacagccctgatcaaaaagtaccctaagctggaaagcgagttcgtgtacggcgactacaaggtgtacgacgtgcggaagatgatcgccaagagcgagcaagagattggcaaggcaaccgccaagtacttcttctacagcaacatcatgaactttttcaagacagagatcaccctcgccaacggcgagatcagaaagcggcctctgatcgagacaaacggcgaaaccggcgagattgtgtgggataagggcagagactttgccacagtgcggaaagtgctgagcatgccccaagtgaatatcgtgaagaaaaccgaggtgcagacaggcggcttcagcaaagagtctatcctgcctaaggggaactccgacaagctgatcgccagaaagaaggactgggaccccaagaaatacggcggctttaactctcccaccgtggcctattctgttctggtggtggccaaagtggaaaagggcaagtccaagaaactcaagagcgtgaaagagctgctggggatcaccatcatggaaagaagcagcttcgagaagaatccgatcgatttcctcgaggccaagggttacaaagaagtgaaaaaggacctgatcatcaagctccccaagtactccctgttcgagctggaaaacggccggaagagaatgctggcctctgccggtgtcctgcagaagggaaacgaactggccctgcctagcaaatatgtgaacttcctgtacctggccagccactatgagaagctgaagggcagccccgaggacaatgagcaaaagcagctgtttgtggaacagcacaagcactacctggacgagatcatcgagcagatcagcgagtttagcaagagagtgattctggccgacgccaatctggacaaagtgctgtccgcctacaacaagcaccgggacaagcctatcagagagcaggccgagaatatcatccacctgtttaccctgaccaacctgggagcccctgcggccttcaagtactttgacaccaccatcaacaggaagcagtacaacaccaccaaagaggtgctggacgccactctgatccgccagtctatcaccggcctgtacgagacacggatcgacctgtctcaactcggaggcgacgaaggcgccgataagagaaccgccgatggctctgagttcgagagccctaagaaaaagcgcaaagtgtag

SEQ ID NO: 489 - protein, 1588 aa, synthetic construct
MSEVEFSHEYWMRHALTLAKRARDEREVPVGAVLVLNNRVIGEGWNRAIGLHDPTAHAEIMALRQGGLVMQNYRLYDATLYTTFEPCVMCAGAMIHSRIGRVVFGVRNAKTGAAGSLMDVLHHPGMNHRVEITEGILADECAALLCDFYRMPRRVFNAQKKAQSSINSGGSSGGSSGSETPGTSESATPESSGGSSGGSDKKYSIGLAIGTNSVGWAVITDEYKVPSKKFKVLGNTDRHSIKKNLIGALLFDSGETAEATRLKRTARRRYTRRKNRICYLQEIFSNEMAKVDDSFFHRLEESFLVEEDKKHERHPIFGNIVDEVAYHEKYPTIYHLRKKLVDSTDKADLRLIYLALAHMIKFRGHFLIEGDLNPDNSDVDKLFIQLVQTYNQLFEENPINASGVDAKAILSARLSKSRRLENLIAQLPGEKKNGLFGNLIALSLGLTPNFKSNFDLAEDAKLQLSKDTYDDDLDNLLAQIGDQYADLFLAAKNLSDAILLSDILRVNTEITKAPLSASMVKRYDEHHQDLTLLKALVRQQLPEKYKEIFFDQSKNGYAGYIDGGASQEEFYKFIKPILEKMDGTEELLVKLNREDLLRKQRTFDNGIIPHQIHLGELHAILRRQGDFYPFLKDNREKIEKILTFRIPYYVGPLARGNSRFAWMTRKSEETITPWNFEEVVDKGASAQSFIERMTNFDKNLPNEKVLPKHSLLYEYFTVYNELTKVKYVTEGMRKPAFLSGEQKKAIVDLLFKTNRKVTVKQLKEDYFKKIECFDSVEISGVEDRFNASLGTYHDLLKIIKDKDFLDNEENEDILEDIVLTLTLFEDREMIEERLKTYAHLFDDKVMKQLKRLRYTGWGRLSRKLINGIRDKQSGKTILDFLKSDGFANRNFMQLIHDDSLTFKEDIQKAQVSGQGDSLHEHIANLAGSPAIKKGILQTVKVVDELVKVMGGHKPENIVIEMARENQTTQKGQKNSRERMKRIEEGIKELGSQILKEHPVENTQLQNEKLYLYYLQNGRDMYVDQELDINRLSDYDVDHIVPQSFLKDDSIDNKVLTRSDKNRGKSDNVPSEEVVKKMKNYWRQLLNAKLITQRKFDNLTKAERGGLSELDKAGFIKRQLVETRQITKHVAQILDSRMNTKYDENDKLIREVKVITLKSKLVSDFRKDFQFYKVREINNYHHAHDAYLNAVVGTALIKKYPKLESEFVYGDYKVYDVRKMIAKSEQEIGKATAKYFFYSNIMNFFKTEITLANGEIRKRPLIETNGETGEIVWDKGRDFATVRKVLSMPQVNIVKKTEVQTGGFSKESILPKGNSDKLIARKKDWDPKKYGGFNSPTVAYSVLVVAKVEKGKSKKLKSVKELLGITIMERSSFEKNPIDFLEAKGYKEVKKDLIIKLPKYSLFELENGRKRMLASAGVLQKGNELALPSKYVNFLYLASHYEKLKGSPEDNEQKQLFVEQHKHYLDEIIEQISEFSKRVILADANLDKVLSAYNKHRDKPIREQAENIIHLFTLTNLGAPAAFKYFDTTINRKQYNTTKEVLDATLIRQSITGLYETRIDLSQLGGDEGADKRTADGSEFESPKKKRKV

SEQ ID NO: 490 - DNA, 4767 bp, synthetic construct
  source 1..4767: mol_type = other DNA
atgtccgaagtcgagttttcccatgagtactggatgagacacgcattgactctcgcaaagagggctcgagatgaacgcgaggtgcccgtgggggcagtactcgtgctcaacaatcgcgtaatcggcgaaggttggaatagggcaatcggactccacgaccccactgcacatgcggaaatcatggcccttcgacagggagggcttgtgatgcagaattatcgactttatgatgcgacgctgtacaccacgtttgaaccttgcgtaatgtgcgcgggagctatgattcactcccgcattggacgagttgtattcggtgttcgcaacgccaagacgggtgccgcaggttcactgatggacgtgctgcatcatccaggcatgaaccaccgggtagaaatcacagaaggcatattggcggacgaatgtgcggcgctgttgtgtgacttttatcgcatgcccaggcgtgtctttaacgcccagaaaaaagcacaatcctctataaactccggcggaagcagcggaggatcttctggaagcgaaaccccaggcaccagcgagtctgccacaccagaatcatctggcggtagctccggcggcagcgacaagaagtattctatcggactggccatcggcaccaactctgttggatgggccgtgatcaccgacgagtacaaggtgcccagcaagaaattcaaggtgctgggcaacaccgacaggcacagcatcaagaagaacctgatcggcgcactgctgttcgactctggcgaaacagccgaggccaccagactgaagagaacagcccgcagacggtacaccagaagaaagaaccggatctgctacctccaagagatcttcagcaacgagatggccaaggtggacgacagcttcttccacagactggaagagtccttcctggtggaagaggacaagaagcacgagagacaccccatcttcggcaacatcgtggacgaggtggcctaccacgagaagtaccccaccatctaccacctgagaaagaaactggtggacagcaccgacaaggccgacctgagactgatctatctggccctggctcacatgatcaagttccggggccacttcctgatcgagggcgacctgaatcctgacaacagcgacgtggacaagctgttcatccagctggtgcagacctacaaccagctgttcgaggaaaaccccatcaacgccagcggagtggatgccaaggccatcctgtctgccagactgagcaagagcagacggctggaaaatctgatcgcccagctgcctggcgagaagaagaatggcctgttcggcaacctgattgccctgagcctgggcctgacacctaacttcaagagcaacttcgacctggccgaggacgccaaactgcagctgagcaaggacacctacgacgacgacctggacaatctgctggcccagatcggcgatcagtacgccgacttgtttctggccgccaagaatctgagcgacgccatcctgctgtccgacatcctgagagtgaacaccgagatcaccaaggcacctctgagcgcctctatggtcaagagatacgacgagcaccaccaggatctgaccctgctgaaggccctcgttagacagcagctgccagagaagtacaaagagattttcttcgaccagagcaagaacggctacgccggctacattgatggcggagccagccaagaggaattctacaagttcatcaagcccatcctcgagaagatggacggcaccgaggaactgctggtcaagctgaacagagaggacctgctgagaaagcagagaaccttcgacaacggcatcatccctcaccagatccacctgggagaactgcacgccattctgcggagacaaggggacttttacccattcctgaaggacaaccgggaaaagatcgagaaaatcctgaccttcaggatcccctactacgtgggaccactggccagaggcaatagcagattcgcctggatgaccagaaagagcgaggaaaccatcactccctggaacttcgaggaagtggtggacaagggcgccagcgctcagtccttcatcgagcggatgaccaacttcgataagaacctgcctaacgagaaggtgctgcccaagcacagcctgctgtacgagtacttcaccgtgtacaacgagctgaccaaagtgaaatacgtgaccgagggaatgagaaagcccgcctttctgagcggcgagcagaaaaaggccatcgtggatctgctgttcaagaccaaccggaaagtgaccgtgaagcagctgaaagaggactacttcaagaaaatcgagtgcttcgacagcgtcgagatctccggcgtggaagatcggttcaatgccagcctgggcacataccacgatctgctgaaaattatcaaggacaaggacttcctggacaacgaagagaacgaggacatccttgaggacatcgtgctgacactgaccctgtttgaggacagagagatgatcgaggaacggctgaaaacatacgcccacctgttcgacgacaaagtgatgaagcaactgaagcggctgagatacaccggctggggcagactgtctcggaagctgatcaacggcatccgggataagcagtccggcaagaccatcctggactttctgaagtccgacggcttcgccaacagaaacttcatgcagctgattcacgacgacagcctcaccttcaaagaggatatccagaaagcccaggtgtccggccagggcgattctctgcatgagcacattgccaacctggccggctctcccgccattaagaaaggcatcctgcagacagtgaaggtggtggacgagcttgtgaaagtgatgggcggacacaagcccgagaacatcgtgatcgaaatggccagagagaaccagaccacacagaagggacagaagaacagccgcgagagaatgaagcggatcgaagagggcatcaaagagctgggcagccagatcctgaaagaacaccccgtggaaaacacccagctgcagaacgagaagctgtacctgtactacctgcagaatggacgggatatgtacgtggaccaagagctggacatcaacagactgtccgactacgatgtggaccatatcgtgccccagtcttttctgaaggacgactccatcgacaacaaggtcctgaccagatccgacaagaatcggggcaagagcgacaacgtgccctccgaagaggtggtcaagaagatgaagaactactggcgacagctgctgaacgccaagctgattacccagcggaagttcgacaatctgaccaaggccgaaagaggcggcctgagcgaactggataaggccggcttcatcaagagacagctggtggaaacccggcagatcacaaagcacgtggcacagattctggactctcggatgaacactaagtacgacgagaacgacaaactgatccgcgaagtgaaagtcatcaccctgaagtccaagctggtgtccgatttccggaaggatttccagttctacaaagtgcgcgagatcaacaactaccatcacgcccacgacgcctacctgaatgccgttgttggaacagccctgatcaaaaagtaccctaagctggaaagcgagttcgtgtacggcgactacaaggtgtacgacgtgcggaagatgatcgccaagagcgagcaagagattggcaaggcaaccgccaagtacttcttctacagcaacatcatgaactttttcaagacagagatcaccctcgccaacggcgagatcagaaagcggcctctgatcgagacaaacggcgaaaccggcgagattgtgtgggataagggcagagactttgccacagtgcggaaagtgctgagcatgccccaagtgaatatcgtgaagaaaaccgaggtgcagacaggcggcttcagcaaagagtctatcctgcctaaggggaactccgacaagctgatcgccagaaagaaggactgggaccccaagaaatacggcggctttaactctcccaccgtggcctattctgttctggtggtggccaaagtggaaaagggcaagtccaagaaactcaagagcgtgaaagagctgctggggatcaccatcatggaaagaagcagcttcgagaagaatccgatcgatttcctcgaggccaagggttacaaagaagtgaaaaaggacctgatcatcaagctccccaagtactccctgttcgagctggaaaacggccggaagagaatgctggcctctgccggtgtcctgcagaagggaaacgaactggccctgcctagcaaatatgtgaacttcctgtacctggccagccactatgagaagctgaagggcagccccgaggacaatgagcaaaagcagctgtttgtggaacagcacaagcactacctggacgagatcatcgagcagatcagcgagtttagcaagagagtgattctggccgacgccaatctggacaaagtgctgtccgcctacaacaagcaccgggacaagcctatcagagagcaggccgagaatatcatccacctgtttaccctgaccaacctgggagcccctgcggccttcaagtactttgacaccaccatcaacaggaagcagtacaacaccaccaaagaggtgctggacgccactctgatccgccagtctatcaccggcctgtacgagacacggatcgacctgtctcaactcggaggcgacgaaggcgccgataagagaaccgccgatggctctgagttcgagagccctaagaaaaagcgcaaagtgtag

SEQ ID NO: 491 - protein, 127 aa, synthetic construct
TAATDKACCACGNDYTTTGAACCTTGCGTAATGDKACGTGGNDYTGTACAGCGTCGCATCATAAAGTACGACTCACTATAAGGAAATAAGAGAGAAAAGAAGAGTAAGAAGAAATATAAGAGCCACC

SEQ ID NO: 492 - DNA, 217 bp, synthetic construct
  source 1..217: mol_type = other DNA
ttaattaagctgccttctgcggggcttgccttctggccatgcccttcttctctcccttgcacctgtacctcttggtctttgaataaagcctgagtaggaagaaaaaaaaaaaaaaaaaaaaaaaaaaaaaaaaaaaaaaaaaaaaaaaaaaaaaaaaaaaaaaaaaaaaaaaaaaaaaaaaaaaaaaaaaaaaaaaaaaaaaaaaaaaaaaaaaaaa

SEQ ID NO: 493 - protein, 5111 aa, synthetic construct
TAATDKACCACGNDYTTTGAACCTTGCGTAATGDKACGTGGNDYTGTACAGCGTCGCATCATAAAGTACGACTCACTATAAGGAAATAAGAGAGAAAAGAAGAGTAAGAAGAAATATAAGAGCCACCATGTCCGAAGTCGAGTTTTCCCATGAGTACTGGATGAGACACGCATTGACTCTCGCAAAGAGGGCTCGAGATGAACGCGAGGTGCCCGTGGGGGCAGTACTCGTGCTCAACAATCGCGTAATCGGCGAAGGTTGGAATAGGGCAATCGGACTCCACGACCCCACTGCACATGCGGAAATCATGGCCCTTCGACAGGGAGGGCTTGTGATGCAGAATTATCGACTTTATGATGCGACGCTGTACACCACGTTTGAACCTTGCGTAATGTGCGCGGGAGCTATGATTCACTCCCGCATTGGACGAGTTGTATTCGGTGTTCGCAACGCCAAGACGGGTGCCGCAGGTTCACTGATGGACGTGCTGCATCATCCAGGCATGAACCACCGGGTAGAAATCACAGAAGGCATATTGGCGGACGAATGTGCGGCGCTGTTGTGTGACTTTTATCGCATGCCCAGGCGTGTCTTTAACGCCCAGAAAAAAGCACAATCCTCTATAAACTCCGGCGGAAGCAGCGGAGGATCTTCTGGAAGCGAAACCCCAGGCACCAGCGAGTCTGCCACACCAGAATCATCTGGCGGTAGCTCCGGCGGCAGCGACAAGAAGTATTCTATCGGACTGGCCATCGGCACCAACTCTGTTGGATGGGCCGTGATCACCGACGAGTACAAGGTGCCCAGCAAGAAATTCAAGGTGCTGGGCAACACCGACAGGCACAGCATCAAGAAGAACCTGATCGGCGCACTGCTGTTCGACTCTGGCGAAACAGCCGAGGCCACCAGACTGAAGAGAACAGCCCGCAGACGGTACACCAGAAGAAAGAACCGGATCTGCTACCTCCAAGAGATCTTCAGCAACGAGATGGCCAAGGTGGACGACAGCTTCTTCCACAGACTGGAAGAGTCCTTCCTGGTGGAAGAGGACAAGAAGCACGAGAGACACCCCATCTTCGGCAACATCGTGGACGAGGTGGCCTACCACGAGAAGTACCCCACCATCTACCACCTGAGAAAGAAACTGGTGGACAGCACCGACAAGGCCGACCTGAGACTGATCTATCTGGCCCTGGCTCACATGATCAAGTTCCGGGGCCACTTCCTGATCGAGGGCGACCTGAATCCTGACAACAGCGACGTGGACAAGCTGTTCATCCAGCTGGTGCAGACCTACAACCAGCTGTTCGAGGAAAACCCCATCAACGCCAGCGGAGTGGATGCCAAGGCCATCCTGTCTGCCAGACTGAGCAAGAGCAGACGGCTGGAAAATCTGATCGCCCAGCTGCCTGGCGAGAAGAAGAATGGCCTGTTCGGCAACCTGATTGCCCTGAGCCTGGGCCTGACACCTAACTTCAAGAGCAACTTCGACCTGGCCGAGGACGCCAAACTGCAGCTGAGCAAGGACACCTACGACGACGACCTGGACAATCTGCTGGCCCAGATCGGCGATCAGTACGCCGACTTGTTTCTGGCCGCCAAGAATCTGAGCGACGCCATCCTGCTGTCCGACATCCTGAGAGTGAACACCGAGATCACCAAGGCACCTCTGAGCGCCTCTATGGTCAAGAGATACGACGAGCACCACCAGGATCTGACCCTGCTGAAGGCCCTCGTTAGACAGCAGCTGCCAGAGAAGTACAAAGAGATTTTCTTCGACCAGAGCAAGAACGGCTACGCCGGCTACATTGATGGCGGAGCCAGCCAAGAGGAATTCTACAAGTTCATCAAGCCCATCCTCGAGAAGATGGACGGCACCGAGGAACTGCTGGTCAAGCTGAACAGAGAGGACCTGCTGAGAAAGCAGAGAACCTTCGACAACGGCATCATCCCTCACCAGATCCACCTGGGAGAACTGCACGCCATTCTGCGGAGACAAGGGGACTTTTACCCATTCCTGAAGGACAACCGGGAAAAGATCGAGAAAATCCTGACCTTCAGGATCCCCTACTACGTGGGACCACTGGCCAGAGGCAATAGCAGATTCGCCTGGATGACCAGAAAGAGCGAGGAAACCATCACTCCCTGGAACTTCGAGGAAGTGGTGGACAAGGGCGCCAGCGCTCAGTCCTTCATCGAGCGGATGACCAACTTCGATAAGAACCTGCCTAACGAGAAGGTGCTGCCCAAGCACAGCCTGCTGTACGAGTACTTCACCGTGTACAACGAGCTGACCAAAGTGAAATACGTGACCGAGGGAATGAGAAAGCCCGCCTTTCTGAGCGGCGAGCAGAAAAAGGCCATCGTGGATCTGCTGTTCAAGACCAACCGGAAAGTGACCGTGAAGCAGCTGAAAGAGGACTACTTCAAGAAAATCGAGTGCTTCGACAGCGTCGAGATCTCCGGCGTGGAAGATCGGTTCAATGCCAGCCTGGGCACATACCACGATCTGCTGAAAATTATCAAGGACAAGGACTTCCTGGACAACGAAGAGAACGAGGACATCCTTGAGGACATCGTGCTGACACTGACCCTGTTTGAGGACAGAGAGATGATCGAGGAACGGCTGAAAACATACGCCCACCTGTTCGACGACAAAGTGATGAAGCAACTGAAGCGGCTGAGATACACCGGCTGGGGCAGACTGTCTCGGAAGCTGATCAACGGCATCCGGGATAAGCAGTCCGGCAAGACCATCCTGGACTTTCTGAAGTCCGACGGCTTCGCCAACAGAAACTTCATGCAGCTGATTCACGACGACAGCCTCACCTTCAAAGAGGATATCCAGAAAGCCCAGGTGTCCGGCCAGGGCGATTCTCTGCATGAGCACATTGCCAACCTGGCCGGCTCTCCCGCCATTAAGAAAGGCATCCTGCAGACAGTGAAGGTGGTGGACGAGCTTGTGAAAGTGATGGGCGGACACAAGCCCGAGAACATCGTGATCGAAATGGCCAGAGAGAACCAGACCACACAGAAGGGACAGAAGAACAGCCGCGAGAGAATGAAGCGGATCGAAGAGGGCATCAAAGAGCTGGGCAGCCAGATCCTGAAAGAACACCCCGTGGAAAACACCCAGCTGCAGAACGAGAAGCTGTACCTGTACTACCTGCAGAATGGACGGGATATGTACGTGGACCAAGAGCTGGACATCAACAGACTGTCCGACTACGATGTGGACCATATCGTGCCCCAGTCTTTTCTGAAGGACGACTCCATCGACAACAAGGTCCTGACCAGATCCGACAAGAATCGGGGCAAGAGCGACAACGTGCCCTCCGAAGAGGTGGTCAAGAAGATGAAGAACTACTGGCGACAGCTGCTGAACGCCAAGCTGATTACCCAGCGGAAGTTCGACAATCTGACCAAGGCCGAAAGAGGCGGCCTGAGCGAACTGGATAAGGCCGGCTTCATCAAGAGACAGCTGGTGGAAACCCGGCAGATCACAAAGCACGTGGCACAGATTCTGGACTCTCGGATGAACACTAAGTACGACGAGAACGACAAACTGATCCGCGAAGTGAAAGTCATCACCCTGAAGTCCAAGCTGGTGTCCGATTTCCGGAAGGATTTCCAGTTCTACAAAGTGCGCGAGATCAACAACTACCATCACGCCCACGACGCCTACCTGAATGCCGTTGTTGGAACAGCCCTGATCAAAAAGTACCCTAAGCTGGAAAGCGAGTTCGTGTACGGCGACTACAAGGTGTACGACGTGCGGAAGATGATCGCCAAGAGCGAGCAAGAGATTGGCAAGGCAACCGCCAAGTACTTCTTCTACAGCAACATCATGAACTTTTTCAAGACAGAGATCACCCTCGCCAACGGCGAGATCAGAAAGCGGCCTCTGATCGAGACAAACGGCGAAACCGGCGAGATTGTGTGGGATAAGGGCAGAGACTTTGCCACAGTGCGGAAAGTGCTGAGCATGCCCCAAGTGAATATCGTGAAGAAAACCGAGGTGCAGACAGGCGGCTTCAGCAAAGAGTCTATCCTGCCTAAGGGGAACTCCGACAAGCTGATCGCCAGAAAGAAGGACTGGGACCCCAAGAAATACGGCGGCTTTAACTCTCCCACCGTGGCCTATTCTGTTCTGGTGGTGGCCAAAGTGGAAAAGGGCAAGTCCAAGAAACTCAAGAGCGTGAAAGAGCTGCTGGGGATCACCATCATGGAAAGAAGCAGCTTCGAGAAGAATCCGATCGATTTCCTCGAGGCCAAGGGTTACAAAGAAGTGAAAAAGGACCTGATCATCAAGCTCCCCAAGTACTCCCTGTTCGAGCTGGAAAACGGCCGGAAGAGAATGCTGGCCTCTGCCGGTGTCCTGCAGAAGGGAAACGAACTGGCCCTGCCTAGCAAATATGTGAACTTCCTGTACCTGGCCAGCCACTATGAGAAGCTGAAGGGCAGCCCCGAGGACAATGAGCAAAAGCAGCTGTTTGTGGAACAGCACAAGCACTACCTGGACGAGATCATCGAGCAGATCAGCGAGTTTAGCAAGAGAGTGATTCTGGCCGACGCCAATCTGGACAAAGTGCTGTCCGCCTACAACAAGCACCGGGACAAGCCTATCAGAGAGCAGGCCGAGAATATCATCCACCTGTTTACCCTGACCAACCTGGGAGCCCCTGCGGCCTTCAAGTACTTTGACACCACCATCAACAGGAAGCAGTACAACACCACCAAAGAGGTGCTGGACGCCACTCTGATCCGCCAGTCTATCACCGGCCTGTACGAGACACGGATCGACCTGTCTCAACTCGGAGGCGACGAAGGCGCCGATAAGAGAACCGCCGATGGCTCTGAGTTCGAGAGCCCTAAGAAAAAGCGCAAAGTGTAGTTAATTAAGCTGCCTTCTGCGGGGCTTGCCTTCTGGCCATGCCCTTCTTCTCTCCCTTGCACCTGTACCTCTTGGTCTTTGAATAAAGCCTGAGTAGGAAGAAAAAAAAAAAAAAAAAAAAAAAAAAAAAAAAAAAAAAAAAAAAAAAAAAAAAAAAAAAAAAAAAAAAAAAAAAAAAAAAAAAAAAAAAAAAAAAAAAAAAAAAAAAAAAAAAAAA

SEQ ID NO: 494 - RNA, 20 nt, synthetic construct
  source 1..20: mol_type = other RNA
gaacacaaagcatagactgc

SEQ ID NO: 495 - RNA, 20 nt, synthetic construct
  source 1..20: mol_type = other RNA
gggaaagacccagcatccgt

SEQ ID NO: 496 - RNA, 20 nt, synthetic construct
  source 1..20: mol_type = other RNA
gctcccatcacatcaaccgg

SEQ ID NO: 497 - RNA, 20 nt, synthetic construct
  source 1..20: mol_type = other RNA
ggtgagtgagtgtgtgcgtg

SEQ ID NO: 498 - RNA, 20 nt, synthetic construct
  source 1..20: mol_type = other RNA
ggcttcaggttctaaatgag

SEQ ID NO: 499 - RNA, 20 nt, synthetic construct
  source 1..20: mol_type = other RNA
gcagagagtcgccgtctcca

SEQ ID NO: 500 - RNA, 20 nt, synthetic construct
  source 1..20: mol_type = other RNA
gtgtaagacctcaaaagcac

SEQ ID NO: 501 - RNA, 20 nt, synthetic construct
  source 1..20: mol_type = other RNA
gatgagaaggagaagttctt

SEQ ID NO: 502 - RNA, 20 nt, synthetic construct
  source 1..20: mol_type = other RNA
gaggacaaagtacaaacggc

SEQ ID NO: 503 - RNA, 20 nt, synthetic construct
  source 1..20: mol_type = other RNA
gccaccacagggaagctggg

SEQ ID NO: 504 - RNA, 20 nt, synthetic construct
  source 1..20: mol_type = other RNA
gctctcaggccctgtccgca

SEQ ID NO: 505 - RNA, 20 nt, synthetic construct
  source 1..20: mol_type = other RNA
gagcaaataccagagataag

SEQ ID NO: 506 - RNA, 20 nt, synthetic construct
  source 1..20: mol_type = other RNA
gatcaggaaatagagccaca

SEQ ID NO: 507 - RNA, 20 nt, synthetic construct
  source 1..20: mol_type = other RNA
gcccatccctgagtccagcg

SEQ ID NO: 508 - RNA, 23 nt, synthetic construct
  source 1..23: mol_type = other RNA
gaacacgaagacatctgaaggta

SEQ ID NO: 509 - RNA, 23 nt, synthetic construct
  source 1..23: mol_type = other RNA
gatttacagcctggcctttgggg

SEQ ID NO: 510 - RNA, 22 nt, synthetic construct
  source 1..22: mol_type = other RNA
ggagagaaagagaagttgattg

SEQ ID NO: 511 - RNA, 22 nt, synthetic construct
  source 1..22: mol_type = other RNA
gagggtgagggatgagataatg

SEQ ID NO: 512 - RNA, 22 nt, synthetic construct
  source 1..22: mol_type = other RNA
ggtggaggagggtgcatggggt

SEQ ID NO: 513 - RNA, 22 nt, synthetic construct
  source 1..22: mol_type = other RNA
gctgttgcatgaggaaagggac

SEQ ID NO: 514 - skipped

SEQ ID NO: 515 - RNA, 20 nt, synthetic construct
  source 1..20: mol_type = other RNA
ggcccagactgagcacgtga

SEQ ID NO: 516 - RNA, 20 nt, synthetic construct
  source 1..20: mol_type = other RNA
ggcactgcggctggaggtgg

SEQ ID NO: 517 - RNA, 21 nt, synthetic construct
  source 1..21: mol_type = other RNA
gcagagcactggaattcgtca

SEQ ID NO: 518 - protein, 166 aa, synthetic construct
SEVEFSHEYWMRHALTLAKRARDEREVPVGAVLVLNNRVIGEGWNRAIGLHDPTAHAEIMALRQGGLVMQNYRLYDATLYTTFEPCVMCAGAMIHSRIGRVVFGVRNAKTGAAGSLMDVLHHPGMNHRVEITEGILADECAALLCRFYRMPRRVFNAQKKAQSSTD

SEQ ID NO: 519 - protein, 166 aa, synthetic construct
SEVEFSHEYWMRHALTLAKRARDEREVPVGAVLVLNNRVIGEGWNRAIGLHDPTAHAEIMALRQGGLVMQNYRLYDATLYTTFEPCVMCAGAMIHSRIGRVVFGVRNAKTGAAGSLMDVLHHPGMNHRVEITEGILADECAALLCDFYRMPRRVFNAQKKAQSSIN

SEQ ID NO: 520 - protein, 1365 aa, synthetic construct
DKKYSIGLAIGTNSVGWAVITDEYKVPSKKFKVLGNTDRHSIKKNLIGALLFDSGETAEATRLKRTARRRYTRRKNRICYLQEIFSNEMAKVDDSFFHRLEESFLVEEDKKHERHPIFGNIVDEVAYHEKYPTIYHLRKKLVDSTDKADLRLIYLALAHMIKFRGHFLIEGDLNPDNSDVDKLFIQLVQTYNQLFEENPINASGVDAKAILSARLSKSRRLENLIAQLPGEKKNGLFGNLIALSLGLTPNFKSNFDLAEDAKLQLSKDTYDDDLDNLLAQIGDQYADLFLAAKNLSDAILLSDILRVNTEITKAPLSASMVKRYDEHHQDLTLLKALVRQQLPEKYKEIFFDQSKNGYAGYIDGGASQEEFYKFIKPILEKMDGTEELLVKLNREDLLRKQRTFDNGIIPHQIHLGELHAILRRQGDFYPFLKDNREKIEKILTFRIPYYVGPLARGNSRFAWMTRKSEETITPWNFEEVVDKGASAQSFIERMTNFDKNLPNEKVLPKHSLLYEYFTVYNELTKVKYVTEGMRKPAFLSGEQKKAIVDLLFKTNRKVTVKQLKEDYFKKIECFDSVEISGVEDRFNASLGTYHDLLKIIKDKDFLDNEENEDILEDIVLTLTLFEDREMIEERLKTYAHLFDDKVMKQLKRLRYTGWGRLSRKLINGIRDKQSGKTILDFLKSDGFANRNFMQLIHDDSLTFKEDIQKAQVSGQGDSLHEHIANLAGSPAIKKGILQTVKVVDELVKVMGGHKPENIVIEMARENQTTQKGQKNSRERMKRIEEGIKELGSQILKEHPVENTQLQNEKLYLYYLQNGRDMYVDQELDINRLSDYDVDHIVPQSFLKDDSIDNKVLTRSDKNRGKSDNVPSEEVVKKMKNYWRQLLNAKLITQRKFDNLTKAERGGLSELDKAGFIKRQLVETRQITKHVAQILDSRMNTKYDENDKLIREVKVITLKSKLVSDFRKDFQFYKVREINNYHHAHDAYLNAVVGTALIKKYPKLESEFVYGDYKVYDVRKMIAKSEQEIGKATAKYFFYSNIMNFFKTEITLANGEIRKRPLIETNGETGEIVWDKGRDFATVRKVLSMPQVNIVKKTEVQTGGFSKESILPKGNSDKLIARKKDWDPKKYGGFNSPTVAYSVLVVAKVEKGKSKKLKSVKELLGITIMERSSFEKNPIDFLEAKGYKEVKKDLIIKLPKYSLFELENGRKRMLASAGVLQKGNELALPSKYVNFLYLASHYEKLKGSPEDNEQKQLFVEQHKHYLDEIIEQISEFSKRVILADANLDKVLSAYNKHRDKPIREQAENIIHLFTLTNLGAPAAFKYFDTTINRKQYNTTKEVLDATLIRQSITGLYETRIDLSQLG

SEQ ID NO: 521 - RNA, 80 nt, synthetic construct; identical to SEQ ID NO: 317
  source 1..80: mol_type = other RNA

SEQ ID NO: 522 - RNA, 94 nt, synthetic construct
  source 1..94: mol_type = other RNA
gttttagagccggcggaaacgccggcaagttaaaataaggctagtccgttatcaacttggacttcggtccaagtggcaccgagtcggtgctttt

SEQ ID NO: 523 - skipped

SEQ ID NO: 524 - protein, 1588 aa, synthetic construct; identical to SEQ ID NO: 487

SEQ ID NO: 525 - protein, 1588 aa, synthetic construct; identical to SEQ ID NO: 489

SEQ ID NO: 526 - protein, 976 aa, Homo sapiens [sequence omitted]

SEQ ID NO: 527 - protein, 976 aa, synthetic construct
MRGARGAWDFLCVLLLLLRVQTGSSQPSVSPGEPSPPSIHPGKSDLIVRVGDEIRLLCTDPGFVKWTFEILDETNENKQNEWITEKAEATNTGKYTCTNKHGLSNSIYVFVRDPAKLFLVDRSLYGKEDNDTLVRCPLTDPEVTNYSLKGCQGKPLPKDLRFIPDPKAGIMIKSVKRAYHRLCLHCSVDQEGKSVLSEKFILKVRPAFKAVPVVSVSKASYLLREGEEFTVTCTIKDVSSSVYSTWKRENSQTKLQEKYDGWHHGDFNYERQATLTISSARVNDSGVFMCYANNTFGSANVTTTLEVVDKGFINIFPMINTTVFVNDGENVDLIVEYEAFPKPEHQQWIYMNRTFTDKWEDYPKSENESNIRYVSELHLTRLKGTEGGTYTFLVSNSDVNAAIAFNVYVNTKPEILTYDRLVNGMLQCVAAGFPEPTIDWYFCPGTEQRCSASVLPVDVQTLNSSGPPFGKLVVQSSIDSSAFKHNGTVECKAYNDVGKTSAYFNFAFKGNNKEQIHPHTLFTPLLIGFVIVAGMMCIIVMILTYKYLQKPMYEVQWKVVEEINGNNYVYIDPTQLPYDHKWEFPRNRLSFGKTLGAGAFGKVVEATAYGLIKSDAAMTVAVKMLKPSAHLTEREALMSELKVLSYLGNHMNIVNLLGACTIGGPTLVITEYCCYGDLLNFLRRKRDSFICSKQEDHAEAALYKNLLHSKESSCSDSTNEYMDMKPGVSYVVPTKADKRRSVRIGSYIERDVTPAIMEDDELALDLEDLLSFSYQVAKGMAFLASKNCIHRDLAARNILLTHGRITKICDFGLARDIKNDSNYVVKGNARLPVKWMAPESIFNCVYTFESDVWSYGIFLWELFSLGSSPYPGMPVDSKFYKMIKEGFRMLSPEHAPAEMYDIMKTCWDADPLKRPTFKQIVQLIEKQISESTNHIYSNLANCSPNRQKPVVDHSVRINSVGSTASSSQPLLVHDDV

SEQ ID NO: 528 - protein, 976 aa, synthetic construct
MRGARGAWDFLCVLLLLLRVQTGSSQPSVSPGEPSPPSIHPGKSDLIVRVGDEIRLLCTDPGFVKWTFEILDETNENKQNEWITEKAEATNTGKYTCTNKHGLSNSIYVFVRDPAKLFLVDRSLYGKEDNDTLVRCPLTDPEVTNYSLKGCQGKPLPKDLRFIPDPKAGIMIKSVKRAYHRLCLHCSVDQEGKSVLSEKFILKVRPAFKAVPVVSVSKASYLLREGEEFTVTCTIKDVSSSVYSTWKRENSQTKLQEKYNGWHHGDFNYERQATLTISSARVNDSGVFMCYANNTFGSANVTTTLEVVDKGFINIFPMINTTVFVNDGENVDLIVEYEAFPKPEHQQWIYMNRTFTDKWEDYPKSENESNIRYVSELHLTRLKGTEGGTYTFLVSNSDVNAAIAFNVYVNTKPEILTYDRLVNGMLQCVAAGFPEPTIDWYFCPGTEQRCSASVLPVDVQTLNSSGPPFGKLVVQSSIDSSAFKHNGTVECKAYNDVGKTSAYFNFAFKGNNKEQIHPHTLFTPLLIGFVIVAGMMCIIVMILTYKYLQKPMYEVQWKVVEEINGNNYVYIDPTQLPYDHKWEFPRNRLSFGKTLGAGAFGKVVEATAYGLIKSDAAMTVAVKMLKPSAHLTEREALMSELKVLSYLGNHMNIVNLLGACTIGGPTLVITEYCCYGDLLNFLRRKRDSFICSKQEDHAEAALYKNLLHSKESSCSDSTNEYMDMKPGVSYVVPTKADKRRSVRIGSYIERDVTPAIMEDDELALDLEDLLSFSYQVAKGMAFLASKNCIHRDLAARNILLTHGRITKICDFGLARDIKNDSNYVVKGNARLPVKWMAPESIFNCVYTFESDVWSYGIFLWELFSLGSSPYPGMPVDSKFYKMIKEGFRMLSPEHAPAEMYDIMKTCWDADPLKRPTFKQIVQLIEKQISESTNHIYSNLANCSPNRQKPVVDHSVRINSVGSTASSSQPLLVHDDV

SEQ ID NO: 529 - protein, 976 aa, synthetic construct
MRGARGAWDFLCVLLLLLRVQTGSSQPSVSPGEPSPPSIHPGKSDLIVRVGDEIRLLCTDPGFVKWTFEILDETNENKQNEWITEKAEATNTGKYTCTNKHGLSNSIYVFVRDPAKLFLVDRSLYGKEDNDTLVRCPLTDPEVTNYSLKGCQGKPLPKDLRFIPDPKAGIMIKSVKRAYHRLCLHCSVDQEGKSVLSEKFILKVRPAFKAVPVVSVSKASYLLREGEEFTVTCTIKDVSSSVYSTWKRENSQTKLQEKCDSWHHGDFNYERQATLTISSARVNDSGVFMCYANNTFGSANVTTTLEVVDKGFINIFPMINTTVFVNDGENVDLIVEYEAFPKPEHQQWIYMNRTFTDKWEDYPKSENESNIRYVSELHLTRLKGTEGGTYTFLVSNSDVNAAIAFNVYVNTKPEILTYDRLVNGMLQCVAAGFPEPTIDWYFCPGTEQRCSASVLPVDVQTLNSSGPPFGKLVVQSSIDSSAFKHNGTVECKAYNDVGKTSAYFNFAFKGNNKEQIHPHTLFTPLLIGFVIVAGMMCIIVMILTYKYLQKPMYEVQWKVVEEINGNNYVYIDPTQLPYDHKWEFPRNRLSFGKTLGAGAFGKVVEATAYGLIKSDAAMTVAVKMLKPSAHLTEREALMSELKVLSYLGNHMNIVNLLGACTIGGPTLVITEYCCYGDLLNFLRRKRDSFICSKQEDHAEAALYKNLLHSKESSCSDSTNEYMDMKPGVSYVVPTKADKRRSVRIGSYIERDVTPAIMEDDELALDLEDLLSFSYQVAKGMAFLASKNCIHRDLAARNILLTHGRITKICDFGLARDIKNDSNYVVKGNARLPVKWMAPESIFNCVYTFESDVWSYGIFLWELFSLGSSPYPGMPVDSKFYKMIKEGFRMLSPEHAPAEMYDIMKTCWDADPLKRPTFKQIVQLIEKQISESTNHIYSNLANCSPNRQKPVVDHSVRINSVGSTASSSQPLLVHDDV

SEQ ID NO: 530 - protein, 976 aa, synthetic construct
MRGARGAWDFLCVLLLLLRVQTGSSQPSVSPGEPSPPSIHPGKSDLIVRVGDEIRLLCTDPGFVKWTFEILDETNENKQNEWITEKAEATNTGKYTCTNKHGLSNSIYVFVRDPAKLFLVDRSLYGKEDNDTLVRCPLTDPEVTNYSLKGCQGKPLPKDLRFIPDPKAGIMIKSVKRAYHRLCLHCSVDQEGKSVLSEKFILKVRPAFKAVPVVSVSKASYLLREGEEFTVTCTIKDVSSSVYSTWKRENSQTKLQEKYDSWHHGDFNYERQATLTISSARVNDSGVFMCYANNTFGSANVTTTLEVVDKGFINIFPMINTTVFVNDGENVDLIVEYEAFPKPEHQQWIYMNRTFTDKWEDYPKSENESNIRYVSELHLTRLKGTEGGTYTFLVSNSDVNAAIAFNVYVNTKPEILTYDRLVNGMLQCVAAGFPEPTIDWYFCPGTEQRCSASVLPVDVQTLNSSGPPFGKLVVQSSIDSSAFKHNGTVECKAYNDVGKTSAYFNFAFKGNNKEQIHPHTLFTPLLIGFVIVAGMMCIIVMILTYKYLQKPMYEVQWKVVEEINGNNYVYIDPTQLPYDHKWEFPRNRLSFGKTLGAGAFGKVVEATAYGLIKSDAAMTVAVKMLKPSAHLTEREALMSELKVLSYLGNHMNIVNLLGACTIGGPTLVITEYCCYGDLLNFLRRKRDSFICSKQEDHAEAALYKNLLHSKESSCSDSTNEYMDMKPGVSYVVPTKADKRRSVRIGSYIERDVTPAIMEDDELALDLEDLLSFSYQVAKGMAFLASKNCIHRDLAARNILLTHGRITKICDFGLARDIKNDSNYVVKGNARLPVKWMAPESIFNCVYTFESDVWSYGIFLWELFSLGSSPYPGMPVDSKFYKMIKEGFRMLSPEHAPAEMYDIMKTCWDADPLKRPTFKQIVQLIEKQISESTNHIYSNLANCSPNRQKPVVDHSVRINSVGSTASSSQPLLVHDDV

SEQ ID NO: 531 - protein, 976 aa, synthetic construct
MRGARGAWDFLCVLLLLLRVQTGSSQPSVSPGEPSPPSIHPGKSDLIVRVGDEIRLLCTDPGFVKWTFEILDETNENKQNEWITEKAEATNTGKYTCTNKHGLSNSIYVFVRDPAKLFLVDRSLYGKEDNDTLVRCPLTDPEVTNYSLKGCQGKPLPKDLRFIPDPKAGIMIKSVKRAYHRLCLHCSVDQEGKSVLSEKFILKVRPAFKAVPVVSVSKASYLLREGEEFTVTCTIKDVSSSVYSTWKRENGQTKLQEKYNSWHHGDFNYERQATLTISSARVNDSGVFMCYANNTFGSANVTTTLEVVDKGFINIFPMINTTVFVNDGENVDLIVEYEAFPKPEHQQWIYMNRTFTDKWEDYPKSENESNIRYVSELHLTRLKGTEGGTYTFLVSNSDVNAAIAFNVYVNTKPEILTYDRLVNGMLQCVAAGFPEPTIDWYFCPGTEQRCSASVLPVDVQTLNSSGPPFGKLVVQSSIDSSAFKHNGTVECKAYNDVGKTSAYFNFAFKGNNKEQIHPHTLFTPLLIGFVIVAGMMCIIVMILTYKYLQKPMYEVQWKVVEEINGNNYVYIDPTQLPYDHKWEFPRNRLSFGKTLGAGAFGKVVEATAYGLIKSDAAMTVAVKMLKPSAHLTEREALMSELKVLSYLGNHMNIVNLLGACTIGGPTLVITEYCCYGDLLNFLRRKRDSFICSKQEDHAEAALYKNLLHSKESSCSDSTNEYMDMKPGVSYVVPTKADKRRSVRIGSYIERDVTPAIMEDDELALDLEDLLSFSYQVAKGMAFLASKNCIHRDLAARNILLTHGRITKICDFGLARDIKNDSNYVVKGNARLPVKWMAPESIFNCVYTFESDVWSYGIFLWELFSLGSSPYPGMPVDSKFYKMIKEGFRMLSPEHAPAEMYDIMKTCWDADPLKRPTFKQIVQLIEKQISESTNHIYSNLANCSPNRQKPVVDHSVRINSVGSTASSSQPLLVHDDV

SEQ ID NO: 532 - DNA, 5190 bp, Homo sapiens
  source 1..5190: mol_type = other DNA
tctgggggctcggctttgccgcgctcgctgcacttgggcgagagctggaacgtggaccagagctcggatcccatcgcagctaccgcgatgagaggcgctcgcggcgcctgggattttctctgcgttctgctcctactgcttcgcgtccagacaggctcttctcaaccatctgtgagtccaggggaaccgtctccaccatccatccatccaggaaaatcagacttaatagtccgcgtgggcgacgagattaggctgttatgcactgatccgggctttgtcaaatggacttttgagatcctggatgaaacgaatgagaataagcagaatgaatggatcacggaaaaggcagaagccaccaacaccggcaaatacacgtgcaccaacaaacacggcttaagcaattccatttatgtgtttgttagagatcctgccaagcttttccttgttgaccgctccttgtatgggaaagaagacaacgacacgctggtccgctgtcctctcacagacccagaagtgaccaattattccctcaaggggtgccaggggaagcctcttcccaaggacttgaggtttattcctgaccccaaggcgggcatcatgatcaaaagtgtgaaacgcgcctaccatcggctctgtctgcattgttctgtggaccaggagggcaagtcagtgctgtcggaaaaattcatcctgaaagtgaggccagccttcaaagctgtgcctgttgtgtctgtgtccaaagcaagctatcttcttagggaaggggaagaattcacagtgacgtgcacaataaaagatgtgtctagttctgtgtactcaacgtggaaaagagaaaacagtcagactaaactacaggagaaatataatagctggcatcacggtgacttcaattatgaacgtcaggcaacgttgactatcagttcagcgagagttaatgattctggagtgttcatgtgttatgccaataatacttttggatcagcaaatgtcacaacaaccttggaagtagtagataaaggattcattaatatcttccccatgataaacactacagtatttgtaaacgatggagaaaatgtagatttgattgttgaatatgaagcattccccaaacctgaacaccagcagtggatctatatgaacagaaccttcactgataaatgggaagattatcccaagtctgagaatgaaagtaatatcagatacgtaagtgaacttcatctaacgagattaaaaggcaccgaaggaggcacttacacattcctagtgtccaattctgacgtcaatgctgccatagcatttaatgtttatgtgaatacaaaaccagaaatcctgacttacgacaggctcgtgaatggcatgctccaatgtgtggcagcaggattcccagagcccacaatagattggtatttttgtccaggaactgagcagagatgctctgcttctgtactgccagtggatgtgcagacactaaactcatctgggccaccgtttggaaagctagtggttcagagttctatagattctagtgcattcaagcacaatggcacggttgaatgtaaggcttacaacgatgtgggcaagacttctgcctattttaactttgcatttaaaggtaacaacaaagagcaaatccatccccacaccctgttcactcctttgctgattggtttcgtaatcgtagctggcatgatgtgcattattgtgatgattctgacctacaaatatttacagaaacccatgtatgaagtacagtggaaggttgttgaggagataaatggaaacaattatgtttacatagacccaacacaacttccttatgatcacaaatgggagtttcccagaaacaggctgagttttgggaaaaccctgggtgctggagctttcgggaaggttgttgaggcaactgcttatggcttaattaagtcagatgcggccatgactgtcgctgtaaagatgctcaagccgagtgcccatttgacagaacgggaagccctcatgtctgaactcaaagtcctgagttaccttggtaatcacatgaatattgtgaatctacttggagcctgcaccattggagggcccaccctggtcattacagaatattgttgctatggtgatcttttgaattttttgagaagaaaacgtgattcatttatttgttcaaagcaggaagatcatgcagaagctgcactttataagaatcttctgcattcaaaggagtcttcctgcagcgatagtactaatgagtacatggacatgaaacctggagtttcttatgttgtcccaaccaaggccgacaaaaggagatctgtgagaataggctcatacatagaaagagatgtgactcccgccatcatggaggatgacgagttggccctagacttagaagacttgctgagcttttcttaccaggtggcaaagggcatggctttcctcgcctccaagaattgtattcacagagacttggcagccagaaatatcctccttactcatggtcggatcacaaagatttgtgattttggtctagccagagacatcaagaatgattctaattatgtggttaaaggaaacgctcgactacctgtgaagtggatggcacctgaaagcattttcaactgtgtatacacgtttgaaagtgacgtctggtcctatgggatttttctttgggagctgttctctttaggaagcagcccctatcctggaatgccggtcgattctaagttctacaagatgatcaaggaaggcttccggatgctcagccctgaacacgcacctgctgaaatgtatgacataatgaagacttgctgggatgcagatcccctaaaaagaccaacattcaagcaaattgttcagctaattgagaagcagatttcagagagcaccaatcatatttactccaacttagcaaactgcagccccaaccgacagaagcccgtggtagaccattctgtgcggatcaattctgtcggcagcaccgcttcctcctcccagcctctgcttgtgcacgacgatgtctgagcagaatcagtgtttgggtcacccctccaggaatgatctcttcttttggcttccatgatggttattttcttttctttcaacttgcatccaactccaggatagtgggcaccccactgcaatcctgtctttctgagcacactttagtggccgatgatttttgtcatcagccaccatcctattgcaaaggttccaactgtatatattcccaatagcaacgtagcttctaccatgaacagaaaacattctgatttggaaaaagagagggaggtatggactgggggccagagtcctttccaaggcttctccaattctgcccaaaaatatggttgatagtttacctgaataaatggtagtaatcacagttggccttcagaaccatccatagtagtatgatgatacaagattagaagctgaaaacctaagtcctttatgtggaaaacagaacatcattagaacaaaggacagagtatgaacacctgggcttaagaaatctagtatttcatgctgggaatgagacataggccatgaaaaaaatgatccccaagtgtgaacaaaagatgctcttctgtggaccactgcatgagcttttatactaccgacctggtttttaaatagagtttgctattagagcattgaattggagagaaggcctccctagccagcacttgtatatacgcatctataaattgtccgtgttcatacatttgaggggaaaacaccataaggtttcgtttctgtatacaaccctggcattatgtccactgtgtatagaagtagattaagagccatataagtttgaaggaaacagttaataccattttttaaggaaacaatataaccacaaagcacagtttgaacaaaatctcctcttttagctgatgaacttattctgtagattctgtggaacaagcctatcagcttcagaatggcattgtactcaatggatttgatgctgtttgacaaagttactgattcactgcatggctcccacaggagtgggaaaacactgccatcttagtttggattcttatgtagcaggaaataaagtataggtttagcctccttcgcaggcatgtcctggacaccgggccagtatctatatatgtgtatgtacgtttgtatgtgtgtagacaaatatttggaggggtatttttgccctgagtccaagagggtcctttagtacctgaaaagtaacttggctttcattattagtactgctcttgtttcttttcacatagctgtctagagtagcttaccagaagcttccatagtggtgcagaggaagtggaaggcatcagtccctatgtatttgcagttcacctgcacttaaggcactctgttatttagactcatcttactgtacctgttccttagaccttccataatgctactgtctcactgaaacatttaaattttaccctttagactgtagcctggatattattcttgtagtttacctctttaaaaacaaaacaaaacaaaacaaaaaactccccttcctcactgcccaatataaaaggcaaatgtgtacatggcagagtttgtgtgttgtcttgaaagattcaggtatgttgcctttatggtttcccccttctacatttcttagactacatttagagaactgtggccgttatctggaagtaaccatttgcactggagttctatgctctcgcacctttccaaagttaacagattttggggttgtgttgtcacccaagagattgttgtttgccatactttgtctgaaaaattcctttgtgtttctattgacttcaatgatagtaagaaaagtggttgttagttatagatgtctaggtacttcaggggcacttcattgagagttttgtcttggatattcttgaaagtttatatttttataattttttcttacatcagatgtttctttgcagtggcttaatgtttgaaattattttgtggctttttttgtaaatattgaaatgtagcaataatgtcttttgaatattcccaagcccatgagtccttgaaaatattttttatatatacagtaactttatgtgtaaatacataagcggcgtaagtttaaaggatgttggtgttccacgtgttttattcctgtatgttgtccaattgttgacagttctgaagaattctaataaaatgtacatatataaatcaaaaaaaaaaaaaaaa

SEQ ID NO: 533 - RNA, 20 nt, synthetic construct
  source 1..20: mol_type = other RNA
atgaaacgaatgagaataag

SEQ ID NO: 534 - RNA, 20 nt, synthetic construct
  source 1..20: mol_type = other RNA
tggatgaaacgaatgagaat

SEQ ID NO: 535 - RNA, 20 nt, synthetic construct
  source 1..20: mol_type = other RNA
gccaggggaagcctcttccc

SEQ ID NO: 536 - RNA, 20 nt, synthetic construct
  source 1..20: mol_type = other RNA
tctgtgtactcaacgtggaa

SEQ ID NO: 537 - RNA, 20 nt, synthetic construct
  source 1..20: mol_type = other RNA
tgtgtactcaacgtggaaaa

SEQ ID NO: 538 - RNA, 20 nt, synthetic construct
  source 1..20: mol_type = other RNA
gggaagattatcccaagtct

SEQ ID NO: 539 - RNA, 20 nt, synthetic construct
  source 1..20: mol_type = other RNA
ccagaaatcctgacttacga

SEQ ID NO: 540 - RNA, 20 nt, synthetic construct
  source 1..20: mol_type = other RNA
tctgagaatgaaagtaatat

SEQ ID NO: 541 - RNA, 20 nt, synthetic construct
  source 1..20: mol_type = other RNA
ctattttaactttgcattta

SEQ ID NO: 542 - RNA, 20 nt, synthetic construct
  source 1..20: mol_type = other RNA
ttcacgagcctgtcgtaagt

SEQ ID NO: 543 - RNA, 20 nt, synthetic construct
  source 1..20: mol_type = other RNA
cagcagtggatctatatgaa

SEQ ID NO: 544 - RNA, 20 nt, synthetic construct
  source 1..20: mol_type = other RNA
cattccccaaacctgaacac

SEQ ID NO: 545 - RNA, 20 nt, synthetic construct
  source 1..20: mol_type = other RNA
tatcccaagtctgagaatga

SEQ ID NO: 546 - RNA, 20 nt, synthetic construct
  source 1..20: mol_type = other RNA
ataaatgggaagattatccc

SEQ ID NO: 547 - RNA, 20 nt, synthetic construct
  source 1..20: mol_type = other RNA
tccccaaacctgaacaccag

SEQ ID NO: 548 - RNA, 20 nt, synthetic construct
  source 1..20: mol_type = other RNA
gccattcacgagcctgtcgt

SEQ ID NO: 549 - RNA, 20 nt, synthetic construct
  source 1..20: mol_type = other RNA
aaatgtcacaacaaccttgg

SEQ ID NO: 550 - RNA, 20 nt, synthetic construct
  source 1..20: mol_type = other RNA
cgtggaaaagagaaaacagt

SEQ ID NO: 551 - RNA, 20 nt, synthetic construct
  source 1..20: mol_type = other RNA
ccatttgacaaagcccggat

SEQ ID NO: 552 - RNA, 20 nt, synthetic construct
  source 1..20: mol_type = other RNA
agcaagctatcttcttaggg

SEQ ID NO: 553 - RNA, 20 nt, synthetic construct
  source 1..20: mol_type = other RNA
tgaggtttattcctgacccc

SEQ ID NO: 554 - RNA, 20 nt, synthetic construct
  source 1..20: mol_type = other RNA
tgaatggatcacggaaaagg

SEQ ID NO: 555 - RNA, 20 nt, synthetic construct
  source 1..20: mol_type = other RNA
ccactggcagtacagaagca

SEQ ID NO: 556 - RNA, 20 nt, synthetic construct
  source 1..20: mol_type = other RNA
agaatgaatggatcacggaa

SEQ ID NO: 557 - RNA, 20 nt, synthetic construct
  source 1..20: mol_type = other RNA
tgtaaacgatggagaaaatg

SEQ ID NO: 558 - RNA, 20 nt, synthetic construct
  source 1..20: mol_type = other RNA
aggcttacaacgatgtgggc

SEQ ID NO: 559 - RNA, 20 nt, synthetic construct
  source 1..20: mol_type = other RNA
aagtgaccaattattccctc

SEQ ID NO: 560 - RNA, 20 nt, synthetic construct
  source 1..20: mol_type = other RNA
tgtcacaacaaccttggaag

SEQ ID NO: 561 - RNA, 20 nt, synthetic construct
  source 1..20: mol_type = other RNA
aatagattggtatttttgtc

SEQ ID NO: 562 - RNA, 20 nt, synthetic construct
  source 1..20: mol_type = other RNA
acaatggcacggttgaatgt

SEQ ID NO: 563 - RNA, 20 nt, synthetic construct
  source 1..20: mol_type = other RNA
acacaacaggcacagctttg

SEQ ID NO: 564 - RNA, 20 nt, synthetic construct
  source 1..20: mol_type = other RNA
gttcagagttctatagattc

SEQ ID NO: 565 - RNA, 20 nt, synthetic construct
  source 1..20: mol_type = other RNA
agatttgattgttgaatatg

SEQ ID NO: 566 - RNA, 20 nt, synthetic construct
  source 1..20: mol_type = other RNA
ataaacattaaatgctatgg

SEQ ID NO: 567 - RNA, 20 nt, synthetic construct
  source 1..20: mol_type = other RNA
atccatccatccaggaaaat

SEQ ID NO: 568 - RNA, 20 nt, synthetic construct
  source 1..20: mol_type = other RNA
atggatcacggaaaaggcag

SEQ ID NO: 569 - RNA, 20 nt, synthetic construct
  source 1..20: mol_type = other RNA
gttgactatcagttcagcga

SEQ ID NO: 570 - RNA, 20 nt, synthetic construct
  source 1..20: mol_type = other RNA
cacaacaaccttggaagtag

SEQ ID NO: 571 - RNA, 20 nt, synthetic construct
  source 1..20: mol_type = other RNA
ctatagattctagtgcattc

SEQ ID NO: 572 - RNA, 20 nt, synthetic construct
  source 1..20: mol_type = other RNA
tgccaataatacttttggat

SEQ ID NO: 573 - RNA, 20 nt, synthetic construct
  source 1..20: mol_type = other RNA
gctttgtcaaatggactttt

SEQ ID NO: 574 - RNA, 20 nt, synthetic construct
  source 1..20: mol_type = other RNA
cttccccatgataaacacta

SEQ ID NO: 575 - RNA, 20 nt, synthetic construct
  source 1..20: mol_type = other RNA
cgtttggaaagctagtggtt

SEQ ID NO: 576 - RNA, 20 nt, synthetic construct
  source 1..20: mol_type = other RNA
aaactacaggagaaatataa

SEQ ID NO: 577 - RNA, 20 nt, synthetic construct
  source 1..20: mol_type = other RNA
aggaggcacttacacattcc

SEQ ID NO: 578 - RNA, 20 nt, synthetic construct
  source 1..20: mol_type = other RNA
cttgaatgcactagaatcta

SEQ ID NO: 579 - RNA, 20 nt, synthetic construct
  source 1..20: mol_type = other RNA
ttccaaacggtggcccagat

SEQ ID NO: 580 - RNA, 20 nt, synthetic construct
  source 1..20: mol_type = other RNA
tccaggaaaatcagacttaa

SEQ ID NO: 581 - RNA, 20 nt, synthetic construct
  source 1..20: mol_type = other RNA
ccctcaaggggtgccagggg

SEQ ID NO: 582 - RNA, 20 nt, synthetic construct
  source 1..20: mol_type = other RNA
tccaaagcaagctatcttct

SEQ ID NO: 583 - RNA, 20 nt, synthetic construct
  source 1..20: mol_type = other RNA
tagggaaggggaagaattca

SEQ ID NO: 584 - RNA, 20 nt, synthetic construct
  source 1..20: mol_type = other RNA
agcgagagttaatgattctg

SEQ ID NO: 585 - RNA, 20 nt, synthetic construct
  source 1..20: mol_type = other RNA
tttggaaagctagtggttca

SEQ ID NO: 586 - RNA, 20 nt, synthetic construct
  source 1..20: mol_type = other RNA
agacggttcccctggactca

SEQ ID NO: 587 - RNA, 20 nt, synthetic construct
  source 1..20: mol_type = other RNA
acgttgactatcagttcagc

SEQ ID NO: 588 - RNA, 20 nt, synthetic construct
  source 1..20: mol_type = other RNA
ctgcacatccactggcagta

SEQ ID NO: 589 - RNA, 20 nt, synthetic construct
  source 1..20: mol_type = other RNA
cacatccactggcagtacag

SEQ ID NO: 590 - RNA, 20 nt, synthetic construct
  source 1..20: mol_type = other RNA
atccactggcagtacagaag

SEQ ID NO: 591 - RNA, 20 nt, synthetic construct
  source 1..20: mol_type = other RNA
ttgacgtcagaattggacac

SEQ ID NO: 592 - RNA, 20 nt, synthetic construct
  source 1..20: mol_type = other RNA
attaactctcgctgaactga

SEQ ID NO: 593 - RNA, 20 nt, synthetic construct
  source 1..20: mol_type = other RNA
ccatacaaggagcggtcaac

SEQ ID NO: 594 - RNA, 20 nt, synthetic construct
  source 1..20: mol_type = other RNA
ttcaggatgaatttttccga

SEQ ID NO: 595 - RNA, 20 nt, synthetic construct
  source 1..20: mol_type = other RNA
gtgacttcaattatgaacgt

SEQ ID NO: 596 - RNA, 20 nt, synthetic construct
  source 1..20: mol_type = other RNA
gtcggaaaaattcatcctga

SEQ ID NO: 597 - RNA, 20 nt, synthetic construct
  source 1..20: mol_type = other RNA
attatatttctcctgtagtt

SEQ ID NO: 598 - RNA, 20 nt, synthetic construct
  source 1..20: mol_type = other RNA
aaggagcggtcaacaaggaa

SEQ ID NO: 599 - RNA, 20 nt, synthetic construct
  source 1..20: mol_type = other RNA
gagattaaaaggcaccgaag

SEQ ID NO: 600 - RNA, 20 nt, synthetic construct
  source 1..20: mol_type = other RNA
aacgagattaaaaggcaccg

SEQ ID NO: 601 - RNA, 20 nt, synthetic construct
  source 1..20: mol_type = other RNA
gaaaaattcatcctgaaagt

SEQ ID NO: 602 - RNA, 20 nt, synthetic construct
  source 1..20: mol_type = other RNA
attcatcctgaaagtgaggc

SEQ ID NO: 603 - RNA, 20 nt, synthetic construct
  source 1..20: mol_type = other RNA
gaaagaagacaacgacacgc

SEQ ID NO: 604 - RNA, 20 nt, synthetic construct
  source 1..20: mol_type = other RNA
tacaggagaaatataatagc

SEQ ID NO: 605 - RNA, 20 nt, synthetic construct
  source 1..20: mol_type = other RNA
atgagaataagcagaatgaa

SEQ ID NO: 606 - RNA, 20 nt, synthetic construct
  source 1..20: mol_type = other RNA
ccaggggaagcctcttccca

SEQ ID NO: 607 - RNA, 20 nt, synthetic construct
  source 1..20: mol_type = other RNA
cagaaatcctgacttacgac

SEQ ID NO: 608 - RNA, 20 nt, synthetic construct
  source 1..20: mol_type = other RNA
acagaaccttcactgataaa

SEQ ID NO: 609 - RNA, 20 nt, synthetic construct
  source 1..20: mol_type = other RNA
tcacgagcctgtcgtaagtc

SEQ ID NO: 610 - RNA, 20 nt, synthetic construct
  source 1..20: mol_type = other RNA
acttacgacaggctcgtgaa

SEQ ID NO: 611 - RNA, 20 nt, synthetic construct
  source 1..20: mol_type = other RNA
tgttcatatagatccactgc

SEQ ID NO: 612 - RNA, 20 nt, synthetic construct
  source 1..20: mol_type = other RNA
ccaaacctgaacaccagcag

SEQ ID NO: 613 - RNA, 20 nt, synthetic construct
  source 1..20: mol_type = other RNA
ctgtcgtaagtcaggatttc

SEQ ID NO: 614 - RNA, 20 nt, synthetic construct
  source 1..20: mol_type = other RNA
cagaaccttcactgataaat

SEQ ID NO: 615 - RNA, 20 nt, synthetic construct
  source 1..20: mol_type = other RNA
tattttaactttgcatttaa

SEQ ID NO: 616 - RNA, 20 nt, synthetic construct
  source 1..20: mol_type = other RNA
taagcagaatgaatggatca

SEQ ID NO: 617 - RNA, 20 nt, synthetic construct
  source 1..20: mol_type = other RNA
gaatggcatgctccaatgtg

SEQ ID NO: 618 - RNA, 20 nt, synthetic construct
  source 1..20: mol_type = other RNA
gtgcagacactaaactcatc

SEQ ID NO: 619 - RNA, 20 nt, synthetic construct
  source 1..20: mol_type = other RNA
tgaccaattattccctcaag

SEQ ID NO: 620 - RNA, 20 nt, synthetic construct
  source 1..20: mol_type = other RNA
gtgaccaattattccctcaa

SEQ ID NO: 621 - RNA, 20 nt, synthetic construct
  source 1..20: mol_type = other RNA
agtgaccaattattccctca

SEQ ID NO: 622 - RNA, 20 nt, synthetic construct
  source 1..20: mol_type = other RNA
gaatgaatggatcacggaaa

SEQ ID NO: 623 - RNA, 20 nt, synthetic construct
  source 1..20: mol_type = other RNA
tgcagacactaaactcatct

SEQ ID NO: 624 - RNA, 20 nt, synthetic construct
  source 1..20: mol_type = other RNA
ccaaagcaagctatcttctt

SEQ ID NO: 625 - RNA, 20 nt, synthetic construct
  source 1..20: mol_type = other RNA
acagcactgacttgccctcc

SEQ ID NO: 626 - RNA, 20 nt, synthetic construct
  source 1..20: mol_type = other RNA
ggagggcaagtcagtgctgt

SEQ ID NO: 627 - RNA, 20 nt, synthetic construct
  source 1..20: mol_type = other RNA
cacataaacattaaatgcta

SEQ ID NO: 628 - RNA, 20 nt, synthetic construct
  source 1..20: mol_type = other RNA
caaatggacttttgagatcc

SEQ ID NO: 629 - RNA, 20 nt, synthetic construct
  source 1..20: mol_type = other RNA
caatggcacggttgaatgta

SEQ ID NO: 630 - RNA, 20 nt, synthetic construct
  source 1..20: mol_type = other RNA
aaatactgtagtgtttatca

SEQ ID NO: 631 - RNA, 20 nt, synthetic construct
  source 1..20: mol_type = other RNA
caaagcaagctatcttctta

SEQ ID NO: 632 - RNA, 20 nt, synthetic construct
  source 1..20: mol_type = other RNA
ggaataaacctcaagtcctt

SEQ ID NO: 633 - RNA, 20 nt, synthetic construct
  source 1..20: mol_type = other RNA
accactagctttccaaacgg

SEQ ID NO: 634 - RNA, 20 nt, synthetic construct
  source 1..20: mol_type = other RNA
gcaagctatcttcttaggga

SEQ ID NO: 635 - RNA, 20 nt, synthetic construct
  source 1..20: mol_type = other RNA
caagctatcttcttagggaa

SEQ ID NO: 636 - RNA, 20 nt, synthetic construct
  source 1..20: mol_type = other RNA
tttgatcatgatgcccgcct

SEQ ID NO: 637 - RNA, 20 nt, synthetic construct
  source 1..20: mol_type = other RNA
ttgatcatgatgcccgcctt

SEQ ID NO: 638 - RNA, 20 nt, synthetic construct
  source 1..20: mol_type = other RNA
atagattggtatttttgtcc

SEQ ID NO: 639 - RNA, 20 nt, synthetic construct
  source 1..20: mol_type = other RNA
aggaataaacctcaagtcct

SEQ ID NO: 640 - RNA, 20 nt, synthetic construct
  source 1..20: mol_type = other RNA
cacaacaggcacagctttga

SEQ ID NO: 641 - RNA, 20 nt, synthetic construct
  source 1..20: mol_type = other RNA
tgacgtcagaattggacact

SEQ ID NO: 642 - RNA, 20 nt, synthetic construct
  source 1..20: mol_type = other RNA
actacagtatttgtaaacga

SEQ ID NO: 643 - RNA, 20 nt, synthetic construct
  source 1..20: mol_type = other RNA
agcaaatgtcacaacaacct

SEQ ID NO: 644 - RNA, 20 nt, synthetic construct
  source 1..20: mol_type = other RNA
gtctgattttcctggatgga

SEQ ID NO: 645 - RNA, 20 nt, synthetic construct
  source 1..20: mol_type = other RNA
tgctgatccaaaagtattat

SEQ ID NO: 646 - RNA, 20 nt, synthetic construct
  source 1..20: mol_type = other RNA
atcagacttaatagtccgcg

SEQ ID NO: 647 - RNA, 20 nt, synthetic construct
  source 1..20: mol_type = other RNA
tgcattcaagcacaatggca

SEQ ID NO: 648 - RNA, 20 nt, synthetic construct
  source 1..20: mol_type = other RNA
tcccagagcccacaatagat

SEQ ID NO: 649 - RNA, 20 nt, synthetic construct
  source 1..20: mol_type = other RNA
tcagcgagagttaatgattc

SEQ ID NO: 650 - RNA, 20 nt, synthetic construct
  source 1..20: mol_type = other RNA
gtgtgaaacgcgcctaccat

SEQ ID NO: 651 - RNA, 20 nt, synthetic construct
  source 1..20: mol_type = other RNA
tcagacttaatagtccgcgt

SEQ ID NO: 652 - RNA, 20 nt, synthetic construct
  source 1..20: mol_type = other RNA
tctagtgcattcaagcacaa

SEQ ID NO: 653 - RNA, 20 nt, synthetic construct
  source 1..20: mol_type = other RNA
attccctcaaggggtgccag

SEQ ID NO: 654 - RNA, 20 nt, synthetic construct
  source 1..20: mol_type = other RNA
aaggcagaagccaccaacac

SEQ ID NO: 655 - RNA, 20 nt, synthetic construct
  source 1..20: mol_type = other RNA
gaggtttattcctgacccca

SEQ ID NO: 656 - RNA, 20 nt, synthetic construct
  source 1..20: mol_type = other RNA
tttattcctgaccccaaggc

SEQ ID NO: 657 - RNA, 20 nt, synthetic construct
  source 1..20: mol_type = other RNA
gtttattcctgaccccaagg

SEQ ID NO: 658 - RNA, 20 nt, synthetic construct
  source 1..20: mol_type = other RNA
catacaaggagcggtcaaca

SEQ ID NO: 659 - RNA, 20 nt, synthetic construct
  source 1..20: mol_type = other RNA
aaaaattcatcctgaaagtg

SEQ ID NO: 660 - RNA, 20 nt, synthetic construct
  source 1..20: mol_type = other RNA
aaatataatagctggcatca

SEQ ID NO: 661 - RNA, 20 nt, synthetic construct
  source 1..20: mol_type = other RNA
tgacttcaattatgaacgtc

SEQ ID NO: 662 - RNA, 20 nt, synthetic construct
  source 1..20: mol_type = other RNA
ctagttctgtgtactcaacg

SEQ ID NO: 663 - RNA, 20 nt, synthetic construct
  source 1..20: mol_type = other RNA
agattaaaaggcaccgaagg

SEQ ID NO: 664 - RNA, 20 nt, synthetic construct
  source 1..20: mol_type = other RNA
acgagattaaaaggcaccga

SEQ ID NO: 665 - RNA, 20 nt, synthetic construct
  source 1..20: mol_type = other RNA
ggatgaaacgaatgagaata

SEQ ID NO: 666 - RNA, 20 nt, synthetic construct
  source 1..20: mol_type = other RNA
aactacaggagaaatataat

SEQ ID NO: 667 - RNA, 20 nt, synthetic construct
  source 1..20: mol_type = other RNA
tgggaaagaagacaacgaca

SEQ ID NO: 668 - RNA, 20 nt, synthetic construct
  source 1..20: mol_type = other RNA
gccaataatacttttggatc

SEQ ID NO: 669 - RNA, 20 nt, synthetic construct
  source 1..20: mol_type = other RNA
cttacgacaggctcgtgaat

SEQ ID NO: 670 - RNA, 20 nt, synthetic construct
  source 1..20: mol_type = other RNA
gttaaaataggcagaagtct

SEQ ID NO: 671 - RNA, 20 nt, synthetic construct
  source 1..20: mol_type = other RNA
ttctgttcatatagatccac

SEQ ID NO: 672 - RNA, 20 nt, synthetic construct
  source 1..20: mol_type = other RNA
agaaatcctgacttacgaca

SEQ ID NO: 673 - RNA, 20 nt, synthetic construct
  source 1..20: mol_type = other RNA
aacgatgtgggcaagacttc

SEQ ID NO: 674 - RNA, 20 nt, synthetic construct
  source 1..20: mol_type = other RNA
attccccaaacctgaacacc

SEQ ID NO: 675 - RNA, 20 nt, synthetic construct
  source 1..20: mol_type = other RNA
cgacaggctcgtgaatggca

SEQ ID NO: 676 - RNA, 20 nt, synthetic construct
  source 1..20: mol_type = other RNA
acttctgcctattttaactt

SEQ ID NO: 677 - RNA, 20 nt, synthetic construct
  source 1..20: mol_type = other RNA
gcgacgagattaggctgtta

SEQ ID NO: 678 - RNA, 20 nt, synthetic construct
  source 1..20: mol_type = other RNA
aagacaacgacacgctggtc

SEQ ID NO: 679 - RNA, 20 nt, synthetic construct
  source 1..20: mol_type = other RNA
tggatcacggaaaaggcaga

SEQ ID NO: 680 - RNA, 20 nt, synthetic construct
  source 1..20: mol_type = other RNA
gacacagacacaacaggcac

SEQ ID NO: 681 - RNA, 20 nt, synthetic construct
  source 1..20: mol_type = other RNA
gggaagaattcacagtgacg

SEQ ID NO: 682 - RNA, 20 nt, synthetic construct
  source 1..20: mol_type = other RNA
gcaccaacaaacacggctta

SEQ ID NO: 683 - RNA, 20 nt, synthetic construct
  source 1..20: mol_type = other RNA
tatagattctagtgcattca

SEQ ID NO: 684 - RNA, 20 nt, synthetic construct
  source 1..20: mol_type = other RNA
tcatgatcaaaagtgtgaaa

SEQ ID NO: 685 - RNA, 20 nt, synthetic construct
  source 1..20: mol_type = other RNA
atgatcaaaagtgtgaaacg

SEQ ID NO: 686 - RNA, 20 nt, synthetic construct
  source 1..20: mol_type = other RNA
aatgaatggatcacggaaaa

SEQ ID NO: 687 - RNA, 20 nt, synthetic construct
  source 1..20: mol_type = other RNA
ccaattattccctcaagggg

SEQ ID NO: 688 - RNA, 20 nt, synthetic construct
  source 1..20: mol_type = other RNA
cagacttaatagtccgcgtg

SEQ ID NO: 689 - RNA, 20 nt, synthetic construct
  source 1..20: mol_type = other RNA
tctgacgtcaatgctgccat

SEQ ID NO: 690 - RNA, 20 nt, synthetic construct
  source 1..20: mol_type = other RNA
gcataacagcctaatctcgt

SEQ ID NO: 691 - RNA, 20 nt, synthetic construct
  source 1..20: mol_type = other RNA
tttttccgacagcactgact

SEQ ID NO: 692 - RNA, 20 nt, synthetic construct
  source 1..20: mol_type = other RNA
tttccgtgatccattcattc

SEQ ID NO: 693 - RNA, 20 nt, synthetic construct
  source 1..20: mol_type = other RNA
tttgacaaagcccggatcag

SEQ ID NO: 694 - RNA, 20 nt, synthetic construct
  source 1..20: mol_type = other RNA
gcccagatgagtttagtgtc

SEQ ID NO: 695 - RNA, 20 nt, synthetic construct
  source 1..20: mol_type = other RNA
gctgaactgatagtcaacgt

SEQ ID NO: 696 - RNA, 20 nt, synthetic construct
  source 1..20: mol_type = other RNA
acacttttgatcatgatgcc

SEQ ID NO: 697 - RNA, 20 nt, synthetic construct
  source 1..20: mol_type = other RNA
gaaaatcagacttaatagtc

SEQ ID NO: 698 - RNA, 20 nt, synthetic construct
  source 1..20: mol_type = other RNA
gcagacactaaactcatctg

SEQ ID NO: 699 - RNA, 20 nt, synthetic construct
  source 1..20: mol_type = other RNA
ggaccaggagggcaagtcag

SEQ ID NO: 700 - RNA, 20 nt, synthetic construct
  source 1..20: mol_type = other RNA
gctgatccaaaagtattatt

SEQ ID NO: 701 - RNA, 20 nt, synthetic construct
  source 1..20: mol_type = other RNA
acatccactggcagtacaga

SEQ ID NO: 702 - RNA, 20 nt, synthetic construct
  source 1..20: mol_type = other RNA
cactggcagtacagaagcag

SEQ ID NO: 703 - RNA, 20 nt, synthetic construct
  source 1..20: mol_type = other RNA
aggcagaagccaccaacacc

SEQ ID NO: 704 - RNA, 20 nt, synthetic construct
  source 1..20: mol_type = other RNA
aggtttattcctgaccccaa

SEQ ID NO: 705 - RNA, 20 nt, synthetic construct
  source 1..20: mol_type = other RNA
ccaagcttttccttgttgac

SEQ ID NO: 706 - RNA, 20 nt, synthetic construct
  source 1..20: mol_type = other RNA
ttagtgtctgcacatccact

SEQ ID NO: 707 - RNA, 20 nt, synthetic construct
  source 1..20: mol_type = other RNA
ccactagctttccaaacggt

SEQ ID NO: 708 - RNA, 20 nt, synthetic construct
  source 1..20: mol_type = other RNA
cctcaaggggtgccagggga

SEQ ID NO: 709 - RNA, 20 nt, synthetic construct
  source 1..20: mol_type = other RNA
tgtgaaacgcgcctaccatc

SEQ ID NO: 710 - RNA, 20 nt, synthetic construct
  source 1..20: mol_type = other RNA
ctagtgcattcaagcacaat

SEQ ID NO: 711 - RNA, 20 nt, synthetic construct
  source 1..20: mol_type = other RNA
ccgcgtgggcgacgagatta

SEQ ID NO: 712 - RNA, 20 nt, synthetic construct
  source 1..20: mol_type = other RNA
ttattcctgaccccaaggcg

SEQ ID NO: 713 - RNA, 20 nt, synthetic construct
  source 1..20: mol_type = other RNA
actccagaatcattaactct

SEQ ID NO: 714 - RNA, 20 nt, synthetic construct
  source 1..20: mol_type = other RNA
ggctgttatgcactgatccg

SEQ ID NO: 715 - RNA, 20 nt, synthetic construct
  source 1..20: mol_type = other RNA
ttcatctaacgagattaaaa

SEQ ID NO: 716 - RNA, 20 nt, synthetic construct
  source 1..20: mol_type = other RNA
acaggagaaatataatagct

SEQ ID NO: 717 - RNA, 20 nt, synthetic construct
  source 1..20: mol_type = other RNA
tcaggatgaatttttccgac

SEQ ID NO: 718 - RNA, 20 nt, synthetic construct
  source 1..20: mol_type = other RNA
gacttcaattatgaacgtca

SEQ ID NO: 719 - RNA, 20 nt, synthetic construct
  source 1..20: mol_type = other RNA
aggagcggtcaacaaggaaa

SEQ ID NO: 720 - RNA, 20 nt, synthetic construct
  source 1..20: mol_type = other RNA
gattaaaaggcaccgaagga

SEQ ID NO: 721 - RNA, 20 nt, synthetic construct
  source 1..20: mol_type = other RNA
aaaattcatcctgaaagtga

SEQ ID NO: 722 - RNA, 20 nt, synthetic construct
  source 1..20: mol_type = other RNA
ataatagctggcatcacggt

SEQ ID NO: 723 - RNA, 20 nt, synthetic construct
  source 1..20: mol_type = other RNA
ccactagctttccaaacggt

SEQ ID NO: 724 - RNA, 20 nt, synthetic construct
  source 1..20: mol_type = other RNA
gctgaactgatagtcaacgt

SEQ ID NO: 725 - RNA, 20 nt, synthetic construct
  source 1..20: mol_type = other RNA
tttgacaaagcccggatcag

SEQ ID NO: 726 - RNA, 20 nt, synthetic construct
  source 1..20: mol_type = other RNA
tgaaagtgaggccaggtact

SEQ ID NO: 727 - RNA, 20 nt, synthetic construct
  source 1..20: mol_type = other RNA
aaacagtcaggtgagtgaat

SEQ ID NO: 728 - RNA, 20 nt, synthetic construct
  source 1..20: mol_type = other RNA
aactacaggagaaatataat

SEQ ID NO: 729 - RNA, 20 nt, synthetic construct
  source 1..20: mol_type = other RNA
gattaaaaggcaccgaagga

SEQ ID NO: 730 - RNA, 20 nt, synthetic construct
  source 1..20: mol_type = other RNA
ggctttacctccaatggtgc

SEQ ID NO: 731 - RNA, 20 nt, synthetic construct
  source 1..20: mol_type = other RNA
cagtacctggcctcactttc

SEQ ID NO: 732 - DNA, 20 bp, synthetic construct
  source 1..20: mol_type = other DNA
atgaaacgaatgagaataag

SEQ ID NO: 733 - DNA, 20 bp, synthetic construct
  source 1..20: mol_type = other DNA
tggatgaaacgaatgagaat

SEQ ID NO: 734 - DNA, 20 bp, synthetic construct
  source 1..20: mol_type = other DNA
gccaggggaagcctcttccc

SEQ ID NO: 735 - DNA, 20 bp, synthetic construct
  source 1..20: mol_type = other DNA
tctgtgtactcaacgtggaa

SEQ ID NO: 736 - DNA, 20 bp, synthetic construct
  source 1..20: mol_type = other DNA
tgtgtactcaacgtggaaaa

SEQ ID NO: 737 - DNA, 20 bp, synthetic construct
  source 1..20: mol_type = other DNA
gggaagattatcccaagtct

SEQ ID NO: 738 - DNA, 20 bp, synthetic construct
  source 1..20: mol_type = other DNA
ccagaaatcctgacttacga

SEQ ID NO: 739 - DNA, 20 bp, synthetic construct
  source 1..20: mol_type = other DNA
tctgagaatgaaagtaatat

SEQ ID NO: 740 - DNA, 20 bp, synthetic construct
  source 1..20: mol_type = other DNA
ctattttaactttgcattta

SEQ ID NO: 741 - DNA, 20 bp, synthetic construct
  source 1..20: mol_type = other DNA
ttcacgagcctgtcgtaagt

SEQ ID NO: 742 - DNA, 20 bp, synthetic construct
  source 1..20: mol_type = other DNA
cagcagtggatctatatgaa

SEQ ID NO: 743 - DNA, 20 bp, synthetic construct
  source 1..20: mol_type = other DNA
cattccccaaacctgaacac

SEQ ID NO: 744 - DNA, 20 bp, synthetic construct
  source 1..20: mol_type = other DNA
tatcccaagtctgagaatga

SEQ ID NO: 745 - DNA, 20 bp, synthetic construct
  source 1..20: mol_type = other DNA
ataaatgggaagattatccc

SEQ ID NO: 746 - DNA, 20 bp, synthetic construct
  source 1..20: mol_type = other DNA
tccccaaacctgaacaccag

SEQ ID NO: 747 - DNA, 20 bp, synthetic construct
  source 1..20: mol_type = other DNA
gccattcacgagcctgtcgt

SEQ ID NO: 748 - DNA, 20 bp, synthetic construct
  source 1..20: mol_type = other DNA
aaatgtcacaacaaccttgg

SEQ ID NO: 749 - DNA, 20 bp, synthetic construct
  source 1..20: mol_type = other DNA
cgtggaaaagagaaaacagt

SEQ ID NO: 750 - DNA, 20 bp, synthetic construct
  source 1..20: mol_type = other DNA
ccatttgacaaagcccggat

SEQ ID NO: 751 - DNA, 20 bp, synthetic construct
  source 1..20: mol_type = other DNA
agcaagctatcttcttaggg

SEQ ID NO: 752 - DNA, 20 bp, synthetic construct
  source 1..20: mol_type = other DNA
tgaggtttattcctgacccc

SEQ ID NO: 753 - DNA, 20 bp, synthetic construct
  source 1..20: mol_type = other DNA
tgaatggatcacggaaaagg

SEQ ID NO: 754 - DNA, 20 bp, synthetic construct
  source 1..20: mol_type = other DNA
ccactggcagtacagaagca

SEQ ID NO: 755 - DNA, 20 bp, synthetic construct
  source 1..20: mol_type = other DNA
agaatgaatggatcacggaa

SEQ ID NO: 756 - DNA, 20 bp, synthetic construct
  source 1..20: mol_type = other DNA
tgtaaacgatggagaaaatg

SEQ ID NO: 757 - DNA, 20 bp, synthetic construct
  source 1..20: mol_type = other DNA
aggcttacaacgatgtgggc

SEQ ID NO: 758 - DNA, 20 bp, synthetic construct
  source 1..20: mol_type = other DNA
aagtgaccaattattccctc

SEQ ID NO: 759 - DNA, 20 bp, synthetic construct
  source 1..20: mol_type = other DNA
tgtcacaacaaccttggaag

SEQ ID NO: 760 - DNA, 20 bp, synthetic construct
  source 1..20: mol_type = other DNA
aatagattggtatttttgtc

SEQ ID NO: 761 - DNA, 20 bp, synthetic construct
  source 1..20: mol_type = other DNA
acaatggcacggttgaatgt

SEQ ID NO: 762 - DNA, 20 bp, synthetic construct
  source 1..20: mol_type = other DNA
acacaacaggcacagctttg

SEQ ID NO: 763 - DNA, 20 bp, synthetic construct
  source 1..20: mol_type = other DNA
gttcagagttctatagattc

SEQ ID NO: 764 - DNA, 20 bp, synthetic construct
  source 1..20: mol_type = other DNA
agatttgattgttgaatatg

SEQ ID NO: 765 - DNA, 20 bp, synthetic construct
  source 1..20: mol_type = other DNA
ataaacattaaatgctatgg

SEQ ID NO: 766 - DNA, 20 bp, synthetic construct
  source 1..20: mol_type = other DNA
atccatccatccaggaaaat

SEQ ID NO: 767 - DNA, 20 bp, synthetic construct
  source 1..20: mol_type = other DNA
atggatcacggaaaaggcag

SEQ ID NO: 768 - DNA, 20 bp, synthetic construct
  source 1..20: mol_type = other DNA
gttgactatcagttcagcga

SEQ ID NO: 769 - DNA, 20 bp, synthetic construct
  source 1..20: mol_type = other DNA
cacaacaaccttggaagtag

SEQ ID NO: 770 - DNA, 20 bp, synthetic construct
  source 1..20: mol_type = other DNA
ctatagattctagtgcattc

SEQ ID NO: 771 - DNA, 20 bp, synthetic construct
  source 1..20: mol_type = other DNA
tgccaataatacttttggat

SEQ ID NO: 772 - DNA, 20 bp, synthetic construct
  source 1..20: mol_type = other DNA
gctttgtcaaatggactttt

SEQ ID NO: 773 - DNA, 20 bp, synthetic construct
  source 1..20: mol_type = other DNA
cttccccatgataaacacta

SEQ ID NO: 774 - DNA, 20 bp, synthetic construct
  source 1..20: mol_type = other DNA
cgtttggaaagctagtggtt

SEQ ID NO: 775 - DNA, 20 bp, synthetic construct
  source 1..20: mol_type = other DNA
aaactacaggagaaatataa

SEQ ID NO: 776 - DNA, 20 bp, synthetic construct
  source 1..20: mol_type = other DNA
aggaggcacttacacattcc

SEQ ID NO: 777 - DNA, 20 bp, synthetic construct
  source 1..20: mol_type = other DNA
cttgaatgcactagaatcta

SEQ ID NO: 778 - DNA, 20 bp, synthetic construct
  source 1..20: mol_type = other DNA
ttccaaacggtggcccagat

SEQ ID NO: 779 - DNA, 20 bp, synthetic construct
  source 1..20: mol_type = other DNA
tccaggaaaatcagacttaa

SEQ ID NO: 780 - DNA, 20 bp, synthetic construct
  source 1..20: mol_type = other DNA
ccctcaaggggtgccagggg

SEQ ID NO: 781 - DNA, 20 bp, synthetic construct
  source 1..20: mol_type = other DNA
tccaaagcaagctatcttct

SEQ ID NO: 782 - DNA, 20 bp, synthetic construct
  source 1..20: mol_type = other DNA
tagggaaggggaagaattca

SEQ ID NO: 783 - DNA, 20 bp, synthetic construct
  source 1..20: mol_type = other DNA
agcgagagttaatgattctg

SEQ ID NO: 784 - DNA, 20 bp, synthetic construct
  source 1..20: mol_type = other DNA
tttggaaagctagtggttca

SEQ ID NO: 785 - DNA, 20 bp, synthetic construct
  source 1..20: mol_type = other DNA
agacggttcccctggactca

SEQ ID NO: 786 - DNA, 20 bp, synthetic construct
  source 1..20: mol_type = other DNA
acgttgactatcagttcagc

SEQ ID NO: 787 - DNA, 20 bp, synthetic construct
  source 1..20: mol_type = other DNA
ctgcacatccactggcagta

SEQ ID NO: 788 - DNA, 20 bp, synthetic construct
  source 1..20: mol_type = other DNA
cacatccactggcagtacag

SEQ ID NO: 789 - DNA, 20 bp, synthetic construct
  source 1..20: mol_type = other DNA
atccactggcagtacagaag

SEQ ID NO: 790 - DNA, 20 bp, synthetic construct
  source 1..20: mol_type = other DNA
ttgacgtcagaattggacac

SEQ ID NO: 791 - DNA, 20 bp, synthetic construct
  source 1..20: mol_type = other DNA
attaactctcgctgaactga

SEQ ID NO: 792 - DNA, 20 bp, synthetic construct
  source 1..20: mol_type = other DNA
ccatacaaggagcggtcaac

SEQ ID NO: 793 - DNA, 20 bp, synthetic construct
  source 1..20: mol_type = other DNA
ttcaggatgaatttttccga

SEQ ID NO: 794 - DNA, 20 bp, synthetic construct
  source 1..20: mol_type = other DNA
gtgacttcaattatgaacgt

SEQ ID NO: 795 - DNA, 20 bp, synthetic construct
  source 1..20: mol_type = other DNA
gtcggaaaaattcatcctga

SEQ ID NO: 796 - DNA, 20 bp, synthetic construct
  source 1..20: mol_type = other DNA
attatatttctcctgtagtt

SEQ ID NO: 797 - DNA, 20 bp, synthetic construct
  source 1..20: mol_type = other DNA
aaggagcggtcaacaaggaa

SEQ ID NO: 798 - DNA, 20 bp, synthetic construct
  source 1..20: mol_type = other DNA
gagattaaaaggcaccgaag

SEQ ID NO: 799 - DNA, 20 bp, synthetic construct
  source 1..20: mol_type = other DNA
aacgagattaaaaggcaccg

SEQ ID NO: 800 - DNA, 20 bp, synthetic construct
  source 1..20: mol_type = other DNA
gaaaaattcatcctgaaagt

SEQ ID NO: 801 - DNA, 20 bp, synthetic construct
  source 1..20: mol_type = other DNA
attcatcctgaaagtgaggc

SEQ ID NO: 802 - DNA, 20 bp, synthetic construct
  source 1..20: mol_type = other DNA
gaaagaagacaacgacacgc

SEQ ID NO: 803 - DNA, 20 bp, synthetic construct
  source 1..20: mol_type = other DNA
tacaggagaaatataatagc

SEQ ID NO: 804 - DNA, 20 bp, synthetic construct
  source 1..20: mol_type = other DNA
atgagaataagcagaatgaa

SEQ ID NO: 805 - DNA, 20 bp, synthetic construct
  source 1..20: mol_type = other DNA
ccaggggaagcctcttccca

SEQ ID NO: 806 - DNA, 20 bp, synthetic construct
  source 1..20: mol_type = other DNA
cagaaatcctgacttacgac

SEQ ID NO: 807 - DNA, 20 bp, synthetic construct
  source 1..20: mol_type = other DNA
acagaaccttcactgataaa

SEQ ID NO: 808 - DNA, 20 bp, synthetic construct
  source 1..20: mol_type = other DNA
tcacgagcctgtcgtaagtc

SEQ ID NO: 809 - DNA, 20 bp, synthetic construct
  source 1..20: mol_type = other DNA
acttacgacaggctcgtgaa

SEQ ID NO: 810 - DNA, 20 bp, synthetic construct
  source 1..20: mol_type = other DNA
tgttcatatagatccactgc

SEQ ID NO: 811 - DNA, 20 bp, synthetic construct
  source 1..20: mol_type = other DNA
ccaaacctgaacaccagcag

SEQ ID NO: 812 - DNA, 20 bp, synthetic construct
  source 1..20: mol_type = other DNA
ctgtcgtaagtcaggatttc

SEQ ID NO: 813 - DNA, 20 bp, synthetic construct
  source 1..20: mol_type = other DNA
cagaaccttcactgataaat

SEQ ID NO: 814 - DNA, 20 bp, synthetic construct
  source 1..20: mol_type = other DNA
tattttaactttgcatttaa

SEQ ID NO: 815 - DNA, 20 bp, synthetic construct
  source 1..20: mol_type = other DNA
taagcagaatgaatggatca

SEQ ID NO: 816 - DNA, 20 bp, synthetic construct
  source 1..20: mol_type = other DNA
gaatggcatgctccaatgtg

SEQ ID NO: 817 - DNA, 20 bp, synthetic construct
  source 1..20: mol_type = other DNA
gtgcagacactaaactcatc

SEQ ID NO: 818 - DNA, 20 bp, synthetic construct
  source 1..20: mol_type = other DNA
tgaccaattattccctcaag

SEQ ID NO: 819 - DNA, 20 bp, synthetic construct
  source 1..20: mol_type = other DNA
gtgaccaattattccctcaa

SEQ ID NO: 820 - DNA, 20 bp, synthetic construct
  source 1..20: mol_type = other DNA
agtgaccaattattccctca

SEQ ID NO: 821 - DNA, 20 bp, synthetic construct
  source 1..20: mol_type = other DNA
gaatgaatggatcacggaaa

SEQ ID NO: 822 - DNA, 20 bp, synthetic construct
  source 1..20: mol_type = other DNA
tgcagacactaaactcatct

SEQ ID NO: 823 - DNA, 20 bp, synthetic construct
  source 1..20: mol_type = other DNA
ccaaagcaagctatcttctt

SEQ ID NO: 824 - DNA, 20 bp, synthetic construct
  source 1..20: mol_type = other DNA
acagcactgacttgccctcc

SEQ ID NO: 825 - DNA, 20 bp, synthetic construct
  source 1..20: mol_type = other DNA
ggagggcaagtcagtgctgt

SEQ ID NO: 826 - DNA, 20 bp, synthetic construct
  source 1..20: mol_type = other DNA
cacataaacattaaatgcta

SEQ ID NO: 827 - DNA, 20 bp, synthetic construct
  source 1..20: mol_type = other DNA
caaatggacttttgagatcc

SEQ ID NO: 828 - DNA, 20 bp, synthetic construct
  source 1..20: mol_type = other DNA
caatggcacggttgaatgta

SEQ ID NO: 829 - DNA, 20 bp, synthetic construct
  source 1..20: mol_type = other DNA
aaatactgtagtgtttatca

SEQ ID NO: 830 - DNA, 20 bp, synthetic construct
  source 1..20: mol_type = other DNA
caaagcaagctatcttctta

SEQ ID NO: 831 - DNA, 20 bp, synthetic construct
  source 1..20: mol_type = other DNA
ggaataaacctcaagtcctt

SEQ ID NO: 832 - DNA, 20 bp, synthetic construct
  source 1..20: mol_type = other DNA
accactagctttccaaacgg

SEQ ID NO: 833 - DNA, 20 bp, synthetic construct
  source 1..20: mol_type = other DNA
gcaagctatcttcttaggga

SEQ ID NO: 834 - DNA, 20 bp, synthetic construct
  source 1..20: mol_type = other DNA
caagctatcttcttagggaa

SEQ ID NO: 835 - DNA, 20 bp, synthetic construct
  source 1..20: mol_type = other DNA
tttgatcatgatgcccgcct

SEQ ID NO: 836 - DNA, 20 bp, synthetic construct
  source 1..20: mol_type = other DNA
ttgatcatgatgcccgcctt

SEQ ID NO: 837 - DNA, 20 bp, synthetic construct
  source 1..20: mol_type = other DNA
atagattggtatttttgtcc

SEQ ID NO: 838 - DNA, 20 bp, synthetic construct
  source 1..20: mol_type = other DNA
aggaataaacctcaagtcct

SEQ ID NO: 839 - DNA, 20 bp, synthetic construct
  source 1..20: mol_type = other DNA
cacaacaggcacagctttga

SEQ ID NO: 840 - DNA, 20 bp, synthetic construct
  source 1..20: mol_type = other DNA
tgacgtcagaattggacact

SEQ ID NO: 841 - DNA, 20 bp, synthetic construct
  source 1..20: mol_type = other DNA
actacagtatttgtaaacga

SEQ ID NO: 842 - DNA, 20 bp, synthetic construct
  source 1..20: mol_type = other DNA
agcaaatgtcacaacaacct

SEQ ID NO: 843 - DNA, 20 bp, synthetic construct
  source 1..20: mol_type = other DNA
gtctgattttcctggatgga

SEQ ID NO: 844 - DNA, 20 bp, synthetic construct
  source 1..20: mol_type = other DNA
tgctgatccaaaagtattat

SEQ ID NO: 845 - DNA, 20 bp, synthetic construct
  source 1..20: mol_type = other DNA
atcagacttaatagtccgcg

SEQ ID NO: 846 - DNA, 20 bp, synthetic construct
  source 1..20: mol_type = other DNA
tgcattcaagcacaatggca

SEQ ID NO: 847 - DNA, 20 bp, synthetic construct
  source 1..20: mol_type = other DNA
tcccagagcccacaatagat

SEQ ID NO: 848 - DNA, 20 bp, synthetic construct
  source 1..20: mol_type = other DNA
tcagcgagagttaatgattc

SEQ ID NO: 849 - DNA, 20 bp, synthetic construct
  source 1..20: mol_type = other DNA
gtgtgaaacgcgcctaccat

SEQ ID NO: 850 - DNA, 20 bp, synthetic construct
  source 1..20: mol_type = other DNA
tcagacttaatagtccgcgt

SEQ ID NO: 851 - DNA, 20 bp, synthetic construct
  source 1..20: mol_type = other DNA
tctagtgcattcaagcacaa

SEQ ID NO: 852 - DNA, 20 bp, synthetic construct
  source 1..20: mol_type = other DNA
attccctcaaggggtgccag

SEQ ID NO: 853 - DNA, 20 bp, synthetic construct
  source 1..20: mol_type = other DNA
aaggcagaagccaccaacac

SEQ ID NO: 854 - DNA, 20 bp, synthetic construct
  source 1..20: mol_type = other DNA
gaggtttattcctgacccca

SEQ ID NO: 855 - DNA, 20 bp, synthetic construct
  source 1..20: mol_type = other DNA
tttattcctgaccccaaggc

SEQ ID NO: 856 - DNA, 20 bp, synthetic construct
  source 1..20: mol_type = other DNA
gtttattcctgaccccaagg

SEQ ID NO: 857 - DNA, 20 bp, synthetic construct
  source 1..20: mol_type = other DNA
catacaaggagcggtcaaca

SEQ ID NO: 858 - DNA, 20 bp, synthetic construct
  source 1..20: mol_type = other DNA
aaaaattcatcctgaaagtg

SEQ ID NO: 859 - DNA, 20 bp, synthetic construct
  source 1..20: mol_type = other DNA
aaatataatagctggcatca

SEQ ID NO: 860 - DNA, 20 bp, synthetic construct
  source 1..20: mol_type = other DNA
tgacttcaattatgaacgtc

SEQ ID NO: 861 - DNA, 20 bp, synthetic construct
  source 1..20: mol_type = other DNA
ctagttctgtgtactcaacg

SEQ ID NO: 862 - DNA, 20 bp, synthetic construct
  source 1..20: mol_type = other DNA
agattaaaaggcaccgaagg

SEQ ID NO: 863 - DNA, 20 bp, synthetic construct
  source 1..20: mol_type = other DNA
acgagattaaaaggcaccga

SEQ ID NO: 864 - DNA, 20 bp, synthetic construct
  source 1..20: mol_type = other DNA
ggatgaaacgaatgagaata

SEQ ID NO: 865 - DNA, 20 bp, synthetic construct
  source 1..20: mol_type = other DNA
aactacaggagaaatataat

SEQ ID NO: 866 - DNA, 20 bp, synthetic construct
  source 1..20: mol_type = other DNA
tgggaaagaagacaacgaca

SEQ ID NO: 867 - DNA, 20 bp, synthetic construct
  source 1..20: mol_type = other DNA
gccaataatacttttggatc

SEQ ID NO: 868 - DNA, 20 bp, synthetic construct
  source 1..20: mol_type = other DNA
cttacgacaggctcgtgaat

SEQ ID NO: 869 - DNA, 20 bp, synthetic construct
  source 1..20: mol_type = other DNA
gttaaaataggcagaagtct

SEQ ID NO: 870 - DNA, 20 bp, synthetic construct
  source 1..20: mol_type = other DNA
ttctgttcatatagatccac

SEQ ID NO: 871 - DNA, 20 bp, synthetic construct
  source 1..20: mol_type = other DNA
agaaatcctgacttacgaca

SEQ ID NO: 872 - DNA, 20 bp, synthetic construct
  source 1..20: mol_type = other DNA
aacgatgtgggcaagacttc

SEQ ID NO: 873 - DNA, 20 bp, synthetic construct
  source 1..20: mol_type = other DNA
attccccaaacctgaacacc

SEQ ID NO: 874 - DNA, 20 bp, synthetic construct
  source 1..20: mol_type = other DNA
cgacaggctcgtgaatggca

SEQ ID NO: 875 - DNA, 20 bp, synthetic construct
  source 1..20: mol_type = other DNA
acttctgcctattttaactt

SEQ ID NO: 876 - DNA, 20 bp, synthetic construct
  source 1..20: mol_type = other DNA
gcgacgagattaggctgtta

SEQ ID NO: 877 - DNA, 20 bp, synthetic construct
  source 1..20: mol_type = other DNA
aagacaacgacacgctggtc

SEQ ID NO: 878 - DNA, 20 bp, synthetic construct
  source 1..20: mol_type = other DNA
tggatcacggaaaaggcaga

SEQ ID NO: 879 - DNA, 20 bp, synthetic construct
  source 1..20: mol_type = other DNA
gacacagacacaacaggcac

SEQ ID NO: 880 - DNA, 20 bp, synthetic construct
  source 1..20: mol_type = other DNA
gggaagaattcacagtgacg

SEQ ID NO: 881 - DNA, 20 bp, synthetic construct
  source 1..20: mol_type = other DNA
gcaccaacaaacacggctta

SEQ ID NO: 882 - DNA, 20 bp, synthetic construct
  source 1..20: mol_type = other DNA
tatagattctagtgcattca

SEQ ID NO: 883 - DNA, 20 bp, synthetic construct
  source 1..20: mol_type = other DNA
tcatgatcaaaagtgtgaaa

SEQ ID NO: 884 - DNA, 20 bp, synthetic construct
  source 1..20: mol_type = other DNA
atgatcaaaagtgtgaaacg

SEQ ID NO: 885 - DNA, 20 bp, synthetic construct
  source 1..20: mol_type = other DNA
aatgaatggatcacggaaaa

SEQ ID NO: 886 - DNA, 20 bp, synthetic construct
  source 1..20: mol_type = other DNA
ccaattattccctcaagggg

SEQ ID NO: 887 - DNA, 20 bp, synthetic construct
  source 1..20: mol_type = other DNA
cagacttaatagtccgcgtg

SEQ ID NO: 888 - DNA, 20 bp, synthetic construct
  source 1..20: mol_type = other DNA
tctgacgtcaatgctgccat

SEQ ID NO: 889 - DNA, 20 bp, synthetic construct
  source 1..20: mol_type = other DNA
gcataacagcctaatctcgt

SEQ ID NO: 890 - DNA, 20 bp, synthetic construct
  source 1..20: mol_type = other DNA
tttttccgacagcactgact

SEQ ID NO: 891 - DNA, 20 bp, synthetic construct
  source 1..20: mol_type = other DNA
tttccgtgatccattcattc

SEQ ID NO: 892 - DNA, 20 bp, synthetic construct
  source 1..20: mol_type = other DNA
tttgacaaagcccggatcag

SEQ ID NO: 893 - DNA, 20 bp, synthetic construct
  source 1..20: mol_type = other DNA
gcccagatgagtttagtgtc

SEQ ID NO: 894 - DNA, 20 bp, synthetic construct
  source 1..20: mol_type = other DNA
gctgaactgatagtcaacgt

SEQ ID NO: 895 - DNA, 20 bp, synthetic construct
  source 1..20: mol_type = other DNA
acacttttgatcatgatgcc

SEQ ID NO: 896 - DNA, 20 bp, synthetic construct
  source 1..20: mol_type = other DNA
gaaaatcagacttaatagtc

SEQ ID NO: 897 - DNA, 20 bp, synthetic construct
  source 1..20: mol_type = other DNA
gcagacactaaactcatctg

SEQ ID NO: 898 - DNA, 20 bp, synthetic construct
  source 1..20: mol_type = other DNA
ggaccaggagggcaagtcag

SEQ ID NO: 899 - DNA, 20 bp, synthetic construct
  source 1..20: mol_type = other DNA
gctgatccaaaagtattatt

SEQ ID NO: 900 - DNA, 20 bp, synthetic construct
  source 1..20: mol_type = other DNA
acatccactggcagtacaga

SEQ ID NO: 901 - DNA, 20 bp, synthetic construct
  source 1..20: mol_type = other DNA
cactggcagtacagaagcag

SEQ ID NO: 902 - DNA, 20 bp, synthetic construct
  source 1..20: mol_type = other DNA
aggcagaagccaccaacacc

SEQ ID NO: 903 - DNA, 20 bp, synthetic construct
  source 1..20: mol_type = other DNA
aggtttattcctgaccccaa

SEQ ID NO: 904 - DNA, 20 bp, synthetic construct
  source 1..20: mol_type = other DNA
ccaagcttttccttgttgac

SEQ ID NO: 905 - DNA, 20 bp, synthetic construct
  source 1..20: mol_type = other DNA
ttagtgtctgcacatccact

SEQ ID NO: 906 - DNA, 20 bp, synthetic construct
  source 1..20: mol_type = other DNA
ccactagctttccaaacggt

SEQ ID NO: 907 - DNA, 20 bp, synthetic construct
  source 1..20: mol_type = other DNA
cctcaaggggtgccagggga

SEQ ID NO: 908 - DNA, 20 bp, synthetic construct
  source 1..20: mol_type = other DNA
tgtgaaacgcgcctaccatc

SEQ ID NO: 909 - DNA, 20 bp, synthetic construct
  source 1..20: mol_type = other DNA
ctagtgcattcaagcacaat

SEQ ID NO: 910 - DNA, 20 bp, synthetic construct
  source 1..20: mol_type = other DNA
ccgcgtgggcgacgagatta

SEQ ID NO: 911 - DNA, 20 bp, synthetic construct
  source 1..20: mol_type = other DNA
ttattcctgaccccaaggcg

SEQ ID NO: 912 - DNA, 20 bp, synthetic construct
  source 1..20: mol_type = other DNA
actccagaatcattaactct

SEQ ID NO: 913 - DNA, 20 bp, synthetic construct
  source 1..20: mol_type = other DNA
ggctgttatgcactgatccg

SEQ ID NO: 914 - DNA, 20 bp, synthetic construct
  source 1..20: mol_type = other DNA
ttcatctaacgagattaaaa

SEQ ID NO: 915 - DNA, 20 bp, synthetic construct
  source 1..20: mol_type = other DNA
acaggagaaatataatagct

SEQ ID NO: 916 - DNA, 20 bp, synthetic construct
  source 1..20: mol_type = other DNA
tcaggatgaatttttccgac

SEQ ID NO: 917 - DNA, 20 bp, synthetic construct
  source 1..20: mol_type = other DNA
gacttcaattatgaacgtca

SEQ ID NO: 918 - DNA, 20 bp, synthetic construct
  source 1..20: mol_type = other DNA
aggagcggtcaacaaggaaa

SEQ ID NO: 919 - DNA, 20 bp, synthetic construct
  source 1..20: mol_type = other DNA
gattaaaaggcaccgaagga

SEQ ID NO: 920 - DNA, 20 bp, synthetic construct
  source 1..20: mol_type = other DNA
aaaattcatcctgaaagtga

SEQ ID NO: 921 - DNA, 20 bp, synthetic construct
  source 1..20: mol_type = other DNA
ataatagctggcatcacggt

SEQ ID NO: 922 - DNA, 20 bp, synthetic construct
  source 1..20: mol_type = other DNA
ccactagctttccaaacggt

SEQ ID NO: 923 - DNA, 20 bp, synthetic construct
  source 1..20: mol_type = other DNA
gctgaactgatagtcaacgt

SEQ ID NO: 924 - DNA, 20 bp, synthetic construct
  source 1..20: mol_type = other DNA
tttgacaaagcccggatcag

SEQ ID NO: 925 - DNA, 20 bp, synthetic construct
  source 1..20: mol_type = other DNA
tgaaagtgaggccaggtact

SEQ ID NO: 926 - DNA, 20 bp, synthetic construct
  source 1..20: mol_type = other DNA
aaacagtcaggtgagtgaat

SEQ ID NO: 927 - DNA, 20 bp, synthetic construct
  source 1..20: mol_type = other DNA
aactacaggagaaatataat

SEQ ID NO: 928 - DNA, 20 bp, synthetic construct
  source 1..20: mol_type = other DNA
gattaaaaggcaccgaagga

SEQ ID NO: 929 - DNA, 20 bp, synthetic construct
  source 1..20: mol_type = other DNA
ggctttacctccaatggtgc

SEQ ID NO: 930 - DNA, 20 bp, synthetic construct
  source 1..20: mol_type = other DNA
cagtacctggcctcactttc
